(19) United States
(12) Patent Application Publication
(10) Pub. No.: US 2007/0032441 A1
(43) Pub. Date: Feb. 8, 2007

(54) Rna interference mediated inhibition of gene expression using chemically modified short interfering nucleic acid (sina)

(75) Inventors: James McSwiggen, Boulder, CO (US); David Morrissey, Boulder, CO (US); Shawn Zinnen, Denver, CO (US); Vasant Jadhav, Longmont, CO (US); Narendra Vaish, Denver, CO (US)

Correspondence Address: MCDONNELL BOEHNEN HULBERT & BERGHOFF LLP, 300 S. WACKER DRIVE, 32ND FLOOR, CHICAGO, IL, 60606, US

(73) Assignee: Sirna Therapeutics, Inc., Boulder, CO (US)

(21) Appl. No.: 10/557,542

(22) PCT Filed: May 24, 2004
(86) PCT No.: PCT/US04/16390

§ 371 Date: Jul. 3, 2006

Related U.S. Application Data
(63) Continuation-in-part of application No. 10/444,853, filed on May 23, 2003.
Application No. 10/444,853 is a continuation-in-part of application No. 10/422,704, filed on Apr. 24, 2003, now abandoned.
Application No. 10/422,704 is a continuation of application No. 10/417,012, filed on Apr. 16, 2003, now abandoned.
Application No. 10/444,853 is a continuation-in-part of application No. PCT/US03/05346, filed on Feb. 20, 2003.
Application No. 10/444,853 is a continuation-in-part of application No. PCT/US03/05028, filed on Feb. 20, 2003.
Application No. 10/444,853 is a continuation-in-part of application No. 10/427,160, filed on Apr. 30, 2003.
Application No. 10/444,853 is a continuation-in-part of application No. PCT/US02/15876, filed on May 17, 2002.
Application No. PCT/US04/16390 is a continuation-in-part of application No. 10/652,791, filed on Aug. 29, 2003.
Application No. 10/652,791 is a continuation of application No. 10/422,704, filed on Apr. 24, 2003, now abandoned.
Application No. 10/422,704 is a continuation of application No. 10/417,012, filed on Apr. 16, 2003, now abandoned.
Application No. 10/417,012 is a continuation-in-part of application No. PCT/US03/05346, filed on Feb. 20, 2003.
Application No. 10/417,012 is a continuation-in-part of application No. PCT/US03/05028, filed on Feb. 20, 2003.
Application No. 10/652,791 is a continuation-in-part of application No. 10/444,853, filed on May 23, 2003.
Application No. PCT/US04/16390 is a continuation-in-part of application No. 10/693,059, filed on Oct. 23, 2003, now abandoned.
Application No. 10/693,059 is a continuation-in-part of application No. 10/444,853, filed on May 23, 2003.
Application No. 10/693,059 is a continuation-in-part of application No. 10/652,791, filed on Aug. 29, 2003.
Application No. 10/652,791 is a continuation of application No. 10/422,704, filed on Apr. 24, 2003, now abandoned.
Application No. 10/422,704 is a continuation of application No. 10/417,012, filed on Apr. 16, 2003, now abandoned.
Application No. 10/693,059 is a continuation-in-part of application No. PCT/US03/05346, filed on Feb. 20, 2003.
Application No. 10/693,059 is a continuation-in-part of application No. PCT/US03/05028, filed on Feb. 20, 2003.
Application No. 10/693,059 is a continuation-in-part of application No. 10/427,160, filed on Apr. 30, 2003.
Application No. 10/693,059 is a continuation-in-part of application No. PCT/US02/15876, filed on May 17, 2002.
Application No. PCT/US04/16390 is a continuation-in-part of application No. 10/720,448, filed on Nov. 24, 2003, now abandoned.
Application No. 10/720,448 is a continuation-in-part of application No. 10/693,059, filed on Oct. 23, 2003, now abandoned.
Application No. 10/693,059 is a continuation-in-part of application No. 10/444,853, filed on May 23, 2003.
Application No. 10/693,059 is a continuation-in-part of application No. 10/652,791, filed on Aug. 29, 2003.
Application No. 10/652,791 is a continuation of application No. 10/422,704, filed on Apr. 24, 2003, now abandoned.
Application No. 10/422,704 is a continuation of application No. 10/417,012, filed on Apr. 16, 2003, now abandoned.
Application No. 10/693,059 is a continuation-in-part of application No. PCT/US03/05346, filed on Feb. 20, 2003.
Application No. 10/693,059 is a continuation-in-part of application No. PCT/US03/05028, filed on Feb. 20, 2003.
Application No. 10/693,059 is a continuation-in-part of application No. 10/427,160, filed on Apr. 30, 2003.
Application No. 10/693,059 is a continuation-in-part of application No. PCT/US02/15876, filed on May 17, 2002.
Application No. PCT/US04/16390 is a continuation-in-part of application No. 10/727,780, filed on Dec. 3, 2003.
Application No. 10/727,780 is a continuation-in-part of application No. 10/720,448, filed on Nov. 24, 2003, now abandoned.
Application No. 10/720,448 is a continuation-in-part of application No. 10/693,059, filed on Oct. 23, 2003, now abandoned.
Application No. 10/693,059 is a continuation-in-part of application No. 10/444,853, filed on May 23, 2003.
Application No. 10/444,853 is a continuation-in-part of application No. PCT/US03/05346, filed on Feb. 20, 2003.
Application No. 10/444,853 is a continuation-in-part of application No. PCT/US03/05028, filed on Feb. 20, 2003.
Application No. PCT/US04/16390 is a continuation-in-part of application No. 10/757,803, filed on Jan. 14, 2004.
Application No. 10/757,803 is a continuation-in-part of application No. 10/720,448, filed on Nov. 24, 2003, now abandoned.
Application No. 10/720,448 is a continuation-in-part of application No. 10/693,059, filed on Oct. 23, 2003, now abandoned.
Application No. 10/693,059 is a continuation-in-part of application No. 10/444,853, filed on May 23, 2003.
Application No. 10/693,059 is a continuation-in-part of application No. 10/652,791, filed on Aug. 29, 2003.
Application No. 10/652,791 is a continuation of application No. 10/422,704, filed on Apr. 24, 2003, now abandoned.
Application No. 10/422,704 is a continuation of application No. 10/417,012, filed on Apr. 16, 2003, now abandoned.
Application No. 10/757,803 is a continuation-in-part of application No. PCT/US03/05346, filed on Feb. 20, 2003.
Application No. 10/757,803 is a continuation-in-part of application No. PCT/US03/05028, filed on Feb. 20, 2003.
Application No. 10/757,803 is a continuation-in-part of application No. 10/427,160, filed on Apr. 30, 2003.
Application No. 10/757,803 is a continuation-in-part of application No. PCT/US02/15876, filed on May 17, 2002.
Application No. 10/757,803 is a continuation-in-part of application No. 10/780,447, filed on Feb. 13, 2004.
Application No. 10/780,447 is a continuation-in-part of application No. 10/427,160, filed on Apr. 30, 2003.
Application No. 10/427,160 is a continuation-in-part of application No. PCT/US02/15876, filed on May 17, 2002.
Application No. 10/427,160 is a continuation-in-part of application No. PCT/US03/05346, filed on Feb. 20, 2003.
Application No. PCT/US04/16390 is a continuation-in-part of application No. 10/826,966, filed on Apr. 16, 2004.
Application No. 10/826,966 is a continuation-in-part of application No. 10/757,803, filed on Jan. 14, 2004.
Application No. 10/757,803 is a continuation-in-part of application No. 10/720,448, filed on Nov. 24, 2003, now abandoned.
Application No. 10/720,448 is a continuation-in-part of application No. 10/693,059, filed on Oct. 23, 2003, now abandoned.
Application No. 10/693,059 is a continuation-in-part of application No. 10/444,853, filed on May 23, 2003.
Application No. 10/693,059 is a continuation-in-part of application No. 10/652,791, filed on Aug. 29, 2003.
Application No. 10/652,791 is a continuation of application No. 10/422,704, filed on Apr. 24, 2003, now abandoned.
Application No. 10/422,704 is a continuation of application No. 10/417,012, filed on Apr. 16, 2003, now abandoned.
Application No. 10/826,966 is a continuation-in-part of application No. PCT/US03/05346, filed on Feb. 20, 2003.
Application No. 10/826,966 is a continuation-in-part of application No. PCT/US03/05028, filed on Feb. 20, 2003.
Application No. PCT/US03/05028 is a continuation-in-part of application No. 60/386,782, filed on Jun. 6, 2002.
Application No. 10/826,966 is a continuation-in-part of application No. 10/780,447, filed on Feb. 13, 2004.
Application No. 10/780,447 is a continuation-in-part of application No. 10/427,160, filed on Apr. 30, 2003.
Application No. 10/780,447 is a continuation-in-part of application No. PCT/US02/15876, filed on May 17, 2002.
Application No. 10/826,966 is a continuation-in-part of application No. 10/727,780, filed on Dec. 3, 2003.
(60) Provisional application No. 60/358,580, filed on Feb. 20, 2002.
(60) Provisional application No. 60/363,124, filed on Mar. 11, 2002.
(60) Provisional application No. 60/386,782, filed on Jun. 6, 2002.
(60) Provisional application No. 60/406,784, filed on Aug. 29, 2002.
(60) Provisional application No. 60/408,378, filed on Sep. 5, 2002.
(60) Provisional application No. 60/409,293, filed on Sep. 9, 2002.
(60) Provisional application No. 60/440,129, filed on Jan. 15, 2003.
(60) Provisional application No. 60/358,580, filed on Feb. 20, 2002.
(60) Provisional application No. 60/363,124, filed on Mar. 11, 2002.
(60) Provisional application No. 60/386,782, filed on Jun. 6, 2002.
(60) Provisional application No. 60/406,784, filed on Aug. 29, 2002.
(60) Provisional application No. 60/408,378, filed on Sep. 5, 2002.
(60) Provisional application No. 60/409,293, filed on Sep. 9, 2002.
(60) Provisional application No. 60/440,129, filed on Jan. 15, 2003.
(60) Provisional application No. 60/358,580, filed on Feb. 20, 2002.
(60) Provisional application No. 60/363,124, filed on Mar. 11, 2002.
(60) Provisional application No. 60/386,782, filed on Jun. 6, 2002.
(60) Provisional application No. 60/406,784, filed on Aug. 29, 2002.
(60) Provisional application No. 60/408,378, filed on Sep. 5, 2002.
(60) Provisional application No. 60/409,293, filed on Sep. 9, 2002.
(60) Provisional application No. 60/440,129, filed on Jan. 15, 2003.
(60) Provisional application No. 60/363,124, filed on Mar. 11, 2002.
(60) Provisional application No. 60/386,782, filed on Jun. 6, 2002.
(60) Provisional application No. 60/406,784, filed on Aug. 29, 2002.
(60) Provisional application No. 60/408,378, filed on Sep. 5, 2002.
(60) Provisional application No. 60/409,293, filed on Sep. 9, 2002.
(60) Provisional application No. 60/440,129, filed on Jan. 15, 2003.
(60) Provisional application No. 60/358,580, filed on Feb. 20, 2002.
(60) Provisional application No. 60/363,124, filed on Mar. 11, 2002.
(60) Provisional application No. 60/386,782, filed on Jun. 6, 2002.
(60) Provisional application No. 60/406,784, filed on Aug. 29, 2002.
(60) Provisional application No. 60/408,378, filed on Sep. 5, 2002.
(60) Provisional application No. 60/409,293, filed on Sep. 9, 2002.
(60) Provisional application No. 60/440,129, filed on Jan. 15, 2003.
(60) Provisional application No. 60/358,580, filed on Feb. 20, 2002.
(60) Provisional application No. 60/358,580, filed on Feb. 20, 2002.
(60) Provisional application No. 60/363,124, filed on Mar. 11, 2002.
(60) Provisional application No. 60/363,124, filed on Mar. 11, 2002.
(60) Provisional application No. 60/386,782, filed on Jun. 6, 2002.
(60) Provisional application No. 60/386,782, filed on Jun. 6, 2002.
(60) Provisional application No. 60/406,784, filed on Aug. 29, 2002.
(60) Provisional application No. 60/406,784, filed on Aug. 29, 2002.
(60) Provisional application No. 60/408,378, filed on Sep. 5, 2002.
(60) Provisional application No. 60/408,378, filed on Sep. 5, 2002.
(60) Provisional application No. 60/409,293, filed on Sep. 9, 2002.
(60) Provisional application No. 60/409,293, filed on Sep. 9, 2002.
(60) Provisional application No. 60/440,129, filed on Jan. 15, 2003.
(60) Provisional application No. 60/440,129, filed on Jan. 15, 2003.
(60) Provisional application No. 60/358,580, filed on Feb. 20, 2002.
(60) Provisional application No. 60/363,124, filed on Mar. 11, 2002.
(60) Provisional application No. 60/386,782, filed on Jun. 6, 2002.
(60) Provisional application No. 60/406,784, filed on Aug. 29, 2002.
(60) Provisional application No. 60/408,378, filed on Sep. 5, 2002.
(60) Provisional application No. 60/409,293, filed on Sep. 9, 2002.
(60) Provisional application No. 60/440,129, filed on Jan. 15, 2003.
(60) Provisional application No. 60/543,480, filed on Feb. 10, 2004.
(60) Provisional application No. 60/292,217, filed on May 18, 2001.
(60) Provisional application No. 60/306,883, filed on Jul. 20, 2001.
(60) Provisional application No. 60/311,865, filed on Aug. 13, 2001.
(60) Provisional application No. 60/362,016, filed on Mar. 6, 2002.
(60) Provisional application No. 60/358,580, filed on Feb. 20, 2002.
(60) Provisional application No. 60/363,124, filed on Mar. 11, 2002.
(60) Provisional application No. 60/386,782, filed on Jun. 6, 2002.
(60) Provisional application No. 60/406,784, filed on Aug. 29, 2002.
(60) Provisional application No. 60/408,378, filed on Sep. 5, 2002.
(60) Provisional application No. 60/409,293, filed on Sep. 9, 2002.
(60) Provisional application No. 60/440,129, filed on Jan. 15, 2003.
(60) Provisional application No. 60/358,580, filed on Feb. 20, 2002.
(60) Provisional application No. 60/358,580, filed on Feb. 20, 2002.
(60) Provisional application No. 60/363,124, filed on Mar. 11, 2002.
(60) Provisional application No. 60/363,124, filed on Mar. 11, 2002.
(60) Provisional application No. 60/386,782, filed on Jun. 6, 2002.
(60) Provisional application No. 60/406,784, filed on Aug. 29, 2002.
(60) Provisional application No. 60/406,784, filed on Aug. 29, 2002.
(60) Provisional application No. 60/408,378, filed on Sep. 5, 2002.
(60) Provisional application No. 60/408,378, filed on Sep. 5, 2002.
(60) Provisional application No. 60/409,293, filed on Sep. 9, 2002.
(60) Provisional application No. 60/292,217, filed on May 18, 2001.
(60) Provisional application No. 60/362,016, filed on Mar. 6, 2002.
(60) Provisional application No. 60/306,883, filed on Jul. 20, 2001.
(60) Provisional application No. 60/311,865, filed on Aug. 13, 2001.
(60) Provisional application No. 60/543,480, filed on Feb. 10, 2004.

(30) Foreign Application Priority Data
Feb. 20, 2003 (WO) PCT/US03/05346
Feb. 20, 2003 (WO) PCT/US03/05028

(51) Int. Cl. A61K 48/00; C07H 21/02

(52) U.S. Cl. 514/44; 536/23.1

(57) ABSTRACT

The present invention concerns methods and reagents useful in modulating gene expression in a variety of applications, including use in therapeutic, cosmetic, cosmeceutical, prophylactic, diagnostic, target validation, and genomic discovery applications. Specifically, the invention relates to synthetic chemically modified small nucleic acid molecules, such as short interfering nucleic acid (siNA), short interfering RNA (siRNA), double-stranded RNA (dsRNA), micro-RNA (miRNA), and short hairpin RNA (shRNA) molecules capable of mediating RNA interference (RNAi) against target nucleic acid sequences. The small nucleic acid molecules are useful in the treatment of any disease (e.g., cancer, proliferative, inflammatory, metabolic, autoimmune, neurologic, ocular diseases), condition, trait (e.g., hair growth and removal), genotype or phenotype that responds to modulation of gene expression or activity in a cell, tissue, or organism. Such small nucleic acid molecules can be administered systemically, locally, or topically.

[0001] This application is a continuation-in-part of U.S. patent application Ser. No. 10/826,966, filed Apr. 16, 2004, which is a continuation-in-part of U.S. patent application Ser. No. 10/757,803, filed Jan. 14, 2004; which is a continuation-in-part of U.S. patent application Ser. No. 10/720,448, filed Nov. 24, 2003; which is a continuation-in-part of U.S. patent application Ser. No. 10/693,059, filed Oct. 23, 2003, which is a continuation-in-part of U.S. patent application Ser. No. 10/444,853, filed May 23, 2003 and a continuation-in-part of U.S. patent application Ser. No. 10/652,791, filed Aug. 29, 2003, which is a continuation of U.S. patent application Ser. No. 10/422,704, filed Apr. 24, 2003, which is a continuation of U.S. patent application Ser. No. 10/417,012, filed Apr. 16, 2003. This application is also a continuation-in-part of International Patent Application No. PCT/US03/05346, filed Feb. 20, 2003, and a continuation-in-part of International Patent Application No. PCT/US03/05028, filed Feb. 20, 2003, both of which claim the benefit of U.S. Provisional Application No. 60/358,580 filed Feb. 20, 2002, U.S. Provisional Application No. 60/363,124 filed Mar. 11, 2002, U.S. Provisional Application No. 60/386,782 filed Jun. 6, 2002, U.S. Provisional Application No. 60/406,784 filed Aug. 29, 2002, U.S. Provisional Application No. 60/408,378 filed Sep. 5, 2002,U.S. Provisional Application No. 60/409,293 filed Sep. 9, 2002, and U.S. Provisional Application No. 60/440,129 filed Jan. 15, 2003. This application is also a continuation-in-part of U.S. patent application Ser. No. 10/427,160, filed Apr. 30, 2003 and which is a continuation-in-part of International Patent Application No. PCT/US02/15876, filed May 17, 2002. This application is also a continuation-in-part of U.S. patent application Ser. No. 10/727,780 filed Dec. 3, 2003. This application also claims the benefit of U.S. Provisional Application No. 60/543,480, filed Feb. 10, 2004. This application also claims priority as a continuation-in-part of U.S. patent application Ser. No. 10/780,447, filed Feb. 13, 2004. This application also claims the benefit of priority of U.S. Provisional Application No. 60/292,217, filed May 18, 2001, U.S. Provisional Application No. 60/362,016, filed Mar. 6, 2002, U.S. Provisional Application No. 60/306,883, filed Jul. 20, 2001, and U.S. Provisional Application No. 60/311,865, filed Aug. 13, 2001, which are all priority applications of U.S. patent application Ser. No. 10/427,160, filed Apr. 30, 2003, and International Patent Application No. PCT/US02/15876, filed May 17, 2002. The instant application claims the benefit of all the above-listed applications, which are hereby incorporated by reference in their entireties, including the drawings.

### FIELD OF THE INVENTION

[0002] The present invention comprises methods and reagents useful in modulating gene expression in a variety of applications, including use in therapeutic, cosmetic, cosmeceutical, prophylactic, diagnostic, target validation, and genomic discovery.

[0003] applications. Specifically, the invention comprises synthetic small nucleic acid molecules, such as short interfering nucleic acid (siNA), short interfering RNA (siRNA), double-stranded RNA (dsRNA), micro-RNA (miRNA), and short hairpin RNA (shRNA) molecules capable of mediating RNA interference (RNAi).

### BACKGROUND OF THE INVENTION

[0004] The following is a discussion of relevant art pertaining to RNAi. The discussion is provided only for understanding of the invention that follows. The summary is not an admission that any of the work described below is prior art to the claimed invention. Applicant demonstrates herein that chemically modified short interfering nucleic acids possess the same capacity to mediate RNAi as do siRNA molecules and are expected to possess improved stability and activity in vivo; therefore, this discussion is not meant to be limiting only to siRNA and can be applied to siNA as a whole.

[0005] RNA interference refers to the process of sequence-specific post-transcriptional gene silencing in animals mediated by short interfering RNAs (siRNAs) (Zamore et al, 2000, Cell, 101, 25-33; Fire et al., 1998, Nature, 391, 806; Hamilton et al., 1999, Science, 286, 950-951; Lin et al., 1999, Nature, 402, 128-129; and Strauss, 1999, Science, 286, 886). The corresponding process in plants (Heifetz et al., International PCT Publication No. WO 99/61631) is commonly referred to as post-transcriptional gene silencing or RNA silencing and is also referred to as quelling in fungi. The process of post-transcriptional gene silencing is thought to be an evolutionarily-conserved cellular defense mechanism used to prevent the expression of foreign genes and is commonly shared by diverse flora and phyla (Fire et al., 1999, Trends Genet., 15, 358). Such protection from foreign gene expression may have evolved in response to the production of double-stranded RNAs (dsRNAs) derived from viral infection or from the random integration of transposon elements into a host genome via a cellular response that specifically destroys homologous single-stranded RNA or viral genomic RNA. The presence of dsRNA in cells triggers the RNAi response through a mechanism that has yet to be fully characterized. This mechanism appears to be different from other known mechanisms involving double stranded RNA-specific ribonucleases, such as the interferon response that results from dsRNA-mediated activation of protein kinase PKR and 2′,5′-oligoadenylate synthetase resulting in non-specific cleavage of mRNA by ribonuclease L (see for example U.S. Pat. Nos. 6,107,094; 5,898,031; Clemens et al, 1997, J. Interferon & Cytokine Res., 17, 503-524; Adah et al., 2001, Curr. Med. Chem., 8, 1189).

[0006] The presence of long dsRNAs in cells stimulates the activity of a ribonuclease III enzyme referred to as dicer (Bass, 2000, Cell, 101, 235; Zamore et al, 2000, Cell, 101, 25-33; Hammond et al., 2000, Nature, 404, 293). Dicer is involved in the processing of the dsRNA into short pieces of dsRNA known as short interfering RNAs (siRNAs) (Zamore et al., 2000, Cell, 101, 25-33; Bass, 2000, Cell, 101, 235; Berstein et al., 2001, Nature, 409, 363). Short interfering RNAs derived from dicer activity are typically about 21 to about 23 nucleotides in length and comprise about 19 base pair duplexes (Zamore et al., 2000, Cell, 101, 25-33; Elbashir et al., 2001, Genes Dev., 15, 188). Dicer has also been implicated in the excision of 21- and 22-nucleotide small temporal RNAs (stRNAs) from precursor RNA of conserved structure that are implicated in translational control (Hutvagner et al., 2001, Science, 293, 834). The RNAi response also features an endonuclease complex, commonly referred to as an RNA-induced silencing complex (RISC), which mediates cleavage of single-stranded RNA having sequence complementary to the antisense strand of the siRNA duplex. Cleavage of the target RNA takes place in the middle of the region complementary to the antisense strand of the siRNA duplex (Elbashir et al., 2001, Genes Dev., 15, 188).

[0007] RNAi has been studied in a variety of systems. Fire et al., 1998, Nature, 391, 806, were the first to observe RNAi in C. elegans. Bahramian and Zarbl, 1999, Molecular and Cellular Biology, 19, 274-283 and Wianny and Goetz, 1999, Nature Cell Biol., 2, 70, describe RNAi mediated by dsRNA in mammalian systems. Hammond et al., 2000, Nature, 404, 293, describe RNAi in Drosophila cells transfected with dsRNA. Elbashir et al., 2001, Nature, 411, 494 and Tuschl et al., International PCT Publication No. WO 01/75164, describe RNAi induced by introduction of duplexes of synthetic 21-nucleotide RNAs in cultured mammalian cells including human embryonic kidney and HeLa cells. Recent work in Drosophila embryonic lysates (Elbashir et al., 2001, EMBO J., 20, 6877 and Tuschl et al., International PCT Publication No. WO 01/75164) has revealed certain requirements for siRNA length, structure, chemical composition, and sequence that are essential to mediate efficient RNAi activity. These studies have shown that 21-nucleotide siRNA duplexes are most active when containing 3′-terminal dinucleotide overhangs. Furthermore, complete substitution of one or both siRNA strands with 2′-deoxy (2′-H) or 2′-O-methyl nucleotides abolishes RNAi activity, whereas substitution of the 3′-terminal siRNA overhang nucleotides with 2′-deoxy nucleotides (2′-H) was shown to be tolerated. Single mismatch sequences in the center of the siRNA duplex were also shown to abolish RNAi activity. In addition, these studies also indicate that the position of the cleavage site in the target RNA is defined by the 5′-end of the siRNA guide sequence rather than the 3′-end of the guide sequence (Elbashir et al., 2001, EMBO J, 20, 6877). Other studies have indicated that a 5′-phosphate on the target-complementary strand of a siRNA duplex is required for siRNA activity and that ATP is utilized to maintain the 5′-phosphate moiety on the siRNA (Nykanen et al., 2001, Cell, 107, 309).

[0008] Studies have shown that replacing the 3′-terminal nucleotide overhanging segments of a 21-mer siRNA duplex having two-nucleotide 3′-overhangs with deoxyribonucleotides does not have an adverse effect on RNAi activity. Replacing up to four nucleotides on each end of the siRNA with deoxyribonucleotides has been reported to be well tolerated, whereas complete substitution with deoxyribonucleotides results in no RNAi activity (Elbashir et al., 2001, EMBO J., 20, 6877 and Tuschl et al., International PCT Publication No. WO 01/75164). In addition, Elbashir et al., supra, also report that substitution of siRNA with 2′-O-methyl nucleotides completely abolishes RNAi activity. Li et al., International PCT Publication No. WO 00/44914, and Beach et al., International PCT Publication No. WO 01/68836 preliminarily suggest that siRNA may include modifications to either the phosphate-sugar backbone or the nucleoside to include at least one of a nitrogen or sulfur heteroatom, however, neither application postulates to what extent such modifications would be tolerated in siRNA molecules, nor provides any further guidance or examples of such modified siRNA. Kreutzer et al., Canadian Patent Application No. 2,359,180, also describe certain chemical modifications for use in dsRNA constructs in order to counteract activation of double-stranded RNA-dependent protein kinase PKR, specifically 2′-amino or 2′-O-methyl nucleotides, and nucleotides containing a 2′-O or 4′-C methylene bridge. However, Kreutzer et al. similarly fails to provide examples or guidance as to what extent these modifications would be tolerated in dsRNA molecules.

[0009] Parrish et al., 2000, Molecular Cell, 6, 1077-1087, tested certain chemical modifications targeting the unc-22 gene in C. elegans using long (>25 nt) siRNA transcripts. The authors describe the introduction of thiophosphate residues into these siRNA transcripts by incorporating thiophosphate nucleotide analogs with T7 and T3 RNA polymerase and observed that RNAs with two phosphorothioate modified bases also had substantial decreases in effectiveness as RNAi. Further, Parrish et al. reported that phosphorothioate modification of more than two residues greatly destabilized the RNAs in vitro such that interference activities could not be assayed. Id. at 1081. The authors also tested certain modifications at the 2′-position of the nucleotide sugar in the long siRNA transcripts and found that substituting deoxynucleotides for ribonucleotides produced a substantial decrease in interference activity, especially in the case of Uridine to Thymidine and/or Cytidine to deoxy-Cytidine substitutions. Id. In addition, the authors tested certain base modifications, including substituting, in sense and antisense strands of the siRNA, 4-thiouracil, 5-bromouracil, 5-iodouracil, and 3-(aminoallyl)uracil for uracil, and inosine for guanosine. Whereas 4-thiouracil and 5-bromouracil substitution appeared to be tolerated, Parrish reported that inosine produced a substantial decrease in interference activity when incorporated in either strand. Parrish also reported that incorporation of 5-iodouracil and 3-(aminoallyl)uracil in the antisense strand resulted in a substantial decrease in RNAi activity as well.

[0010] The use of longer dsRNA has been described. For example, Beach et al., International PCT Publication No. WO 01/68836, describes specific methods for attenuating gene expression using endogenously-derived dsRNA. Tuschl et al., International PCT Publication No. WO 01/75164, describe a Drosophila in vitro RNAi system and the use of specific siRNA molecules for certain functional genomic and certain therapeutic applications; although Tuschl, 2001, Chem. Biochem., 2, 239-245, doubts that RNAi can be used to cure genetic diseases or viral infection due to the danger of activating interferon response. Li et al., International PCT Publication No. WO 00/44914, describe the use of specific long (141 bp-488 bp) enzymatically synthesized or vector expressed dsRNAs for attenuating the expression of certain target genes. Zernicka-Goetz et al., International PCT Publication No. WO 01/36646, describe certain methods for inhibiting the expression of particular genes in mammalian cells using certain long (550 bp-714 bp), enzymatically synthesized or vector expressed dsRNA molecules. Fire et al., International PCT Publication No. WO 99/32619, describe particular methods for introducing certain long dsRNA molecules into cells for use in inhibiting gene expression in nematodes. Plaetinck et al., International PCT Publication No. WO 00/01846, describe certain methods for identifying specific genes responsible for conferring a particular phenotype in a cell using specific long dsRNA molecules. Mello et al., International PCT Publication No. WO 01/29058, describe the identification of specific genes involved in dsRNA-mediated RNAi. Pachuck et al., International PCT Publication No. WO 00/63364, describe certain long (at least 200 nucleotide) dsRNA constructs. Deschamps Depaillette et al., International PCT Publication No. WO 99/07409, describe specific compositions consisting of particular dsRNA molecules combined with certain anti-viral agents. Waterhouse et al., International PCT Publication No. 99/53050 and 1998, PNAS, 95, 13959-13964, describe certain methods for decreasing the phenotypic expression of a nucleic acid in plant cells using certain dsRNAs. Driscoll et al., International PCT Publication No. WO 01/49844, describe specific DNA expression constructs for use in facilitating gene silencing in targeted organisms.

[0011] Others have reported on various RNAi and gene-silencing systems. For example, Parrish et al., 2000, Molecular Cell, 6, 1077-1087, describe specific chemically-modified dsRNA constructs targeting the unc-22 gene of C. elegans. Grossniklaus, International PCT Publication No. WO 01/38551, describes certain methods for regulating polycomb gene expression in plants using certain dsRNAs. Churikov et al., International PCT Publication No. WO 01/42443, describe certain methods for modifying genetic characteristics of an organism using certain dsRNAs. Cogoni et al., International PCT Publication No. WO 01/53475, describe certain methods for isolating a Neurospora silencing gene and uses thereof. Reed et al., International PCT Publication No. WO 01/68836, describe certain methods for gene silencing in plants. Honer et al., International PCT Publication No. WO 01/70944, describe certain methods of drug screening using transgenic nematodes as Parkinson's Disease models using certain dsRNAs. Deak et al., International PCT Publication No. WO 01/72774, describe certain Drosophila-derived gene products that may be related to RNAi in Drosophila. Arndt et al., International PCT Publication No. WO 01/92513 describe certain methods for mediating gene suppression by using factors that enhance RNAi. Tuschl et al., International PCT Publication No. WO 02/44321, describe certain synthetic siRNA constructs. Pachuk et al., International PCT Publication No. WO 00/63364, and Satishchandran et al., International PCT Publication No. WO 01/04313, describe certain methods and compositions for inhibiting the function of certain polynucleotide sequences using certain long (over 250 bp), vector expressed dsRNAs. Echeverri et al., International PCT Publication No. WO 02/38805, describe certain C. elegans genes identified via RNAi. Kreutzer et al., International PCT Publications Nos. WO 02/055692, WO 02/055693, and EP 1144623 B1 describes certain methods for inhibiting gene expression using dsRNA. Graham et al., International PCT Publications Nos. WO 99/49029 and WO 01/70949, and AU 4037501 describe certain vector expressed siRNA molecules. Fire et al., U.S. Pat. No. 6,506,559, describe certain methods for inhibiting gene expression in vitro using certain long dsRNA (299 bp-1033 bp) constructs that mediate RNAi. Martinez et al., 2002, Cell, 110, 563-574, describe certain single stranded siRNA constructs, including certain 5′-phosphorylated single stranded siRNAs that mediate RNA interference in Hela cells. Harborth et al., 2003, Antisense & Nucleic Acid Drug Development, 13, 83-105, describe certain chemically and structurally modified siRNA molecules. Chiu and Rana, 2003, RNA, 9, 1034-1048, describe certain chemically and structurally modified siRNA molecules. Woolf et al., International PCT Publication Nos. WO 03/064626 and WO 03/064625 describe certain chemically modified dsRNA constructs.

### SUMMARY OF THE INVENTION

[0012] This invention comprises compounds, compositions, and methods useful for modulating RNA function and/or gene expression in a cell. Specifically, the instant invention features synthetic small nucleic acid molecules, such as short interfering nucleic acid (siNA), short interfering RNA (siRNA), double-stranded RNA (dsRNA), micro-RNA (miRNA), and short hairpin RNA (shRNA) molecules capable of modulating gene expression in cells by RNA inference (RNAi). The siNA molecules of the invention can be chemically modified. The use of chemically modified siNA can improve various properties of native siRNA molecules through increased resistance to nuclease degradation in vivo and/or improved cellular uptake. The chemically modified siNA molecules of the instant invention provide useful reagents and methods for a variety of therapeutic, cosmetic, cosmeceutical, prophylactic, diagnostic, agricultural, target validation, genomic discovery, genetic engineering and pharmacogenomic applications.

[0013] In one embodiment, the invention features compounds, compositions, and methods useful for modulating the expression of genes associated with the maintenance or development of a disease, condition, or trait in a cell, organism, or subject, for example genes and variants thereof, including polymorphic variants such as single nucleotide polymorphism (SNP) variants associated with one or more diseases, conditions, or traits using short interfering nucleic acid (siNA) molecules. This invention also relates to compounds, compositions, and methods useful for modulating the expression and activity of genes associated with the maintenance or development of a disease, condition, or trait in a cell, organism, or subject by RNA interference (RNAi) using small nucleic acid molecules. In particular, the instant invention features small nucleic acid molecules, such as short interfering nucleic acid (siNA), short interfering RNA (siRNA), double-stranded RNA (dsRNA), micro-RNA (miRNA), and short hairpin RNA (shRNA) molecules and methods used to modulate the expression of genes and/or gene alleles associated with the development or maintenance of a disease, condition, or trait in a cell, organism, or subject.

[0014] In a non-limiting example, the introduction of chemically modified nucleotides into nucleic acid molecules provides a powerful tool in overcoming potential limitations of in vivo stability and bioavailability inherent to native RNA molecules that are delivered exogenously. For example, the use of chemically modified nucleic acid molecules can enable a lower dose of a particular nucleic acid molecule for a given therapeutic effect since chemically modified nucleic acid molecules tend to have a longer half-life in serum. Furthermore, certain chemical modifications can improve the bioavailability of nucleic acid molecules by targeting particular cells or tissues and/or improving cellular uptake of the nucleic acid molecule. Therefore, even if the activity of a chemically modified nucleic acid molecule is reduced as compared to a native nucleic acid molecule, for example when compared to an all RNA nucleic acid molecule, the overall activity of the modified nucleic acid molecule can be greater than the native molecule due to improved stability and/or delivery of the molecule. Unlike native unmodified siRNA, chemically modified siNA can also minimize the possibility of activating interferon activity in humans.

[0015] In one embodiment, the invention features one or more siNA molecules and methods that independently or in combination modulate the expression of genes encoding proteins that are associated with the maintenance and/or development of a disease, condition, or trait in a cell, organism, or subject, Such genes include those encoding sequences comprising those sequences referred to by GenBank Accession Nos. described herein and in Table V of PCT/US03/05028 (International PCT Publication No. WO 03/74654), all of which genes are included within in the definition of gene(s) herein. The description below of the various aspects and embodiments of the invention is provided with reference to such exemplary genes. However, the various aspects and embodiments are also directed to other genes, such as gene mutations, alternative splice variants, allelic variants and polymorphisms such as single nucleotide polymorphisms (SNPs) associated with the development or maintenance of a disease, condition, or trait in a cell, organism, or subject. These additional genes can be analyzed for target sites using the methods generally described for genes herein. Thus, the modulation of other genes and the effects of such modulation of the other genes can be performed, determined, and measured as described herein.

[0016] In one embodiment, the invention features a double-stranded short interfering nucleic acid (siNA) molecule that down-regulates expression of a gene, wherein said siNA molecule comprises about 19 to about 21 base pairs.

[0017] In one embodiment, the invention features a siNA molecule that down-regulates expression of a gene, for example, wherein the gene comprises a protein encoding sequence. In one embodiment, the invention features a siNA molecule that down-regulates expression of a gene, for example, wherein the gene comprises non-coding sequence or regulatory elements involved in gene expression.

[0018] In one embodiment, the invention features a siNA molecule having RNAi activity against a RNA, wherein the siNA molecule comprises a sequence complementary to any RNA having coding or non-encoding sequence, such as those sequences having GenBank Accession Nos. shown in Table I or sequences referred to by GenBank Accession Nos. described herein and in Table V of PCT/US03/05028 (International PCT Publication No. WO 03/4654) or otherwise known in the art. In another embodiment, the invention features a siNA molecule having RNAi activity against a RNA, wherein the siNA molecule comprises a sequence complementary to an RNA having variant (e.g., mutant, polymorphism, alternative splice variant) encoding sequence, for example other mutant genes not shown in Table I but known in the art to be associated with the maintenance and/or development of a disease, condition, or trait. Chemical modifications as shown in Tables III and IV or otherwise described herein can be applied to any siNA construct of the invention. In another embodiment, a siNA molecule of the invention includes a nucleotide sequence that can interact with nucleotide sequence of a gene and thereby mediate silencing of gene expression, for example, wherein the siNA mediates regulation of gene expression by cellular processes that modulate the chromatin structure or methylation patterns of the gene and prevent transcription of the gene.

[0019] In one embodiment, the nucleic acid molecules of the invention that act as mediators of the RNA interference gene silencing response are chemically modified double stranded nucleic acid molecules. As in their native double stranded RNA counterparts, these siNA molecules typically consist of duplexes containing about 19 base pairs between oligonucleotides comprising about 19 to about 25 nucleotides. The most active siRNA molecules are thought to have such duplexes with overhanging ends of 1-3 nucleotides, for example 21 nucleotide duplexes with 19 base pairs and 2 nucleotide 3′-overhangs. These overhanging segments are readily hydrolyzed by endonucleases in vivo. Studies have shown that replacing the 3′-overhanging segments of a 21-mer siRNA duplex having 2 nucleotide 3′ overhangs with deoxyribonucleotides does not have an adverse effect on RNAi activity. Replacing up to 4 nucleotides on each end of the siRNA with deoxyribonucleotides has been reported to be well tolerated whereas complete substitution with deoxyribonucleotides results in no RNAi activity (Elbashir et al., 2001, EMBO J., 20, 6877). In addition, Elbashir et al, supra, also report that substitution of siRNA with 2′-O-methyl nucleotides completely abolishes RNAi activity. Li et al., International PCT Publication No. WO 00/44914, and Beach et al., International PCT Publication No. WO 01/68836 both suggest that siRNA may include modifications to either the phosphate-sugar back bone or the nucleoside to include at least one of a nitrogen or sulfur heteroatom, however neither application teaches to what extent these modifications are tolerated in siRNA molecules nor provide any examples of such modified siRNA. Kreutzer and Limmer, Canadian Patent Application No. 2,359,180, also describe certain chemical modifications for use in dsRNA constructs in order to counteract activation of double stranded-RNA-dependent protein kinase PKR, specifically 2′-amino or 2′-O-methyl nucleotides, and nucleotides containing a 2′-O or 4′-C methylene bridge. However, Kreutzer and Limmer similarly fail to show to what extent these modifications are tolerated in siRNA molecules nor provide any examples of such modified siRNA.

[0020] In one embodiment, the invention features chemically modified siNA constructs having specificity for target nucleic acid molecules in a cell. Non-limiting examples of such chemical modifications include without limitation phosphorothioate internucleotide linkages, 2′-O-methyl ribonucleotides, 2′-deoxy-2′-fluoro ribonucleotides, 2′-deoxy ribonucleotides, “universal base” nucleotides, 5-C-methyl nucleotides, and inverted deoxyabasic residue incorporation. These chemical modifications, when used in various siNA constructs, are shown to preserve RNAi activity in cells while at the same time, dramatically increasing the serum stability of these compounds. Furthermore, contrary to the data published by Parrish et al., supra, applicant demonstrates that multiple (greater than one) phosphorothioate substitutions are well-tolerated and confer substantial increases in serum stability for modified siNA constructs.

[0021] In one embodiment, the chemically-modified siNA molecules of the invention comprise a duplex having two strands, one or both of which can be chemically-modified, wherein each strand is about 19 to about 29 (e.g., about 18, 19, 20, 21, 22, 23, 24, 25, 26, 27, 28, 29 or 30) nucleotides. In one embodiment, the chemically-modified siNA molecules of the invention comprise a duplex having two strands, one or both of which can be chemically-modified, wherein each strand is about 19 to about 23 (e.g., about 18, 19, 20, 21, 22, 23 or 24) nucleotides. In one embodiment, a siNA molecule of the invention comprises modified nucleotides while maintaining the ability to mediate RNAi. The modified nucleotides can be used to improve in vitro or in vivo characteristics such as stability, activity, and/or bioavailability. For example, a siNA molecule of the invention can comprise modified nucleotides as a percentage of the total number of nucleotides present in the siNA molecule. As such, a siNA molecule of the invention can generally comprise modified nucleotides from about 5 to about 100% of the nucleotide positions (e.g., 5%, 10%, 15%, 20%, 25%, 30%, 35%, 40%, 45%, 50%, 55%, 60%, 65%, 70%, 75%, 80%, 85%, 90%, 95% or 100% of the nucleotide positions). The actual percentage of modified nucleotides present in a given siNA molecule depends on the total number of nucleotides present in the siNA. If the siNA molecule is single stranded, the percent modification can be based upon the total number of nucleotides present in the single stranded siNA molecules. Likewise, if the siNA molecule is double stranded, the percent modification can be based upon the total number of nucleotides present in the sense strand, antisense strand, or both the sense and antisense strands. In addition, the actual percentage of modified nucleotides present in a given siNA molecule can also depend on the total number of purine and pyrimidine nucleotides present in the siNA, for example, wherein all pyrimidine nucleotides and/or all purine nucleotides present in the siNA molecule are modified.

[0022] The antisense region of a siNA molecule of the invention can comprise a phosphorothioate internucleotide linkage at the 3′-end of said antisense region. The antisense region can comprise about one to about five phosphorothioate internucleotide linkages at the 5′-end of said antisense region. The 3′-terminal nucleotide overhangs of a siNA molecule of the invention can comprise ribonucleotides or deoxyribonucleotides that are chemically-modified at a nucleic acid sugar, base, or backbone. The 3′-terminal nucleotide overhangs can comprise one or more universal base ribonucleotides. The 3′-terminal nucleotide overhangs can comprise one or more acyclic nucleotides. The 3′-terminal nucleotide overhangs can comprise one or more cap moieties, such as cap moieties shown in FIG. 22.

[0023] In one embodiment, a siNA molecule of the invention comprises blunt ends, i.e., the ends do not include any overhanging nucleotides. For example, a siNA molecule of the invention comprising modifications described herein (e.g., comprising nucleotides having Formulae I-VII or siNA constructs comprising “Stab00”-“Stab25” (Table IV) or any combination thereof) and/or any length described herein can comprise blunt ends or ends with no overhanging nucleotides.

[0024] In one embodiment, any siNA molecule of the invention can comprise one or more blunt ends, i.e. where a blunt end does not have any overhanging nucleotides. In a non-limiting example, a blunt ended siNA molecule has a number of base pairs equal to the number of nucleotides present in each strand of the siNA molecule. In another example, a siNA molecule comprises one blunt end, for example wherein the 5′-end of the antisense strand and the 3′-end of the sense strand do not have any overhanging nucleotides. In another example, a siNA molecule comprises one blunt end, for example wherein the 3′-end of the antisense strand and the 5′-end of the sense strand do not have any overhanging nucleotides. In another example, a siNA molecule comprises two blunt ends, for example wherein the 3′-end of the antisense strand and the 5′-end of the sense strand as well as the 5′-end of the antisense strand and 3′-end of the sense strand do not have any overhanging nucleotides. A blunt ended siNA molecule can comprise, for example, from about 18 to about 30 nucleotides (e.g., about 18, 18, 19, 20, 21, 22, 23, 24, 25, 26, 27, 28, 29, or 30 nucleotides). Other nucleotides present in a blunt ended siNA molecule can comprise mismatches, bulges, loops, or wobble base pairs, for example, to modulate the activity of the siNA molecule to mediate RNA interference.

[0025] By “blunt ends” is meant symmetric termini or termini of a double stranded siNA molecule having no overhanging nucleotides. The two strands of a double stranded siNA molecule align with each other without over-hanging nucleotides at the termini. For example, a blunt ended siNA construct comprises terminal nucleotides that are complimentary between the sense and antisense regions of the siNA molecule.

[0026] In one embodiment, the invention features the use of a double-stranded short interfering nucleic acid (siNA) molecule to down-regulate expression of a target gene, wherein the siNA molecule comprises one or more chemical modifications and each strand of the double-stranded siNA is about 19 to about 23 nucleotides (e.g., about 19, 20, 21, 22, or 23 nucleotides) long.

[0027] In one embodiment, the invention features a double-stranded short interfering nucleic acid (siNA) molecule that down-regulates expression of a target gene, wherein the siNA molecule comprises no ribonucleotides and each strand of the double-stranded siNA comprises about 19 to about 23 nucleotides (e.g., about 19, 20, 21, 22, or 23 nucleotides).

[0028] In one embodiment, one of the strands of a double-stranded siNA molecule of the invention comprises a nucleotide sequence that is complementary to a nucleotide sequence or a portion thereof of a target gene, and wherein the second strand of a double-stranded siNA molecule comprises a nucleotide sequence substantially similar to the nucleotide sequence or a portion thereof of the target gene.

[0029] In one embodiment, a siNA molecule of the invention comprises about 19 to about 23 nucleotides (e.g., about 19, 20, 21, 22, or 23 nucleotides), and each strand comprises at least about 19 nucleotides that are complementary to the nucleotides of the other strand.

[0030] In one embodiment, a siNA molecule of the invention comprises an antisense region comprising a nucleotide sequence that is complementary to a nucleotide sequence or a portion thereof of a target gene, and the siNA further comprises a sense region, wherein the sense region comprises a nucleotide sequence substantially similar to the nucleotide sequence or a portion thereof of the target gene. The antisense region and the sense region each comprise about 19 to about 23 nucleotides (e.g., about 19, 20, 21, 22, or 23 nucleotides), and the antisense region comprises at least about 19 nucleotides that are complementary to nucleotides of the sense region.

[0031] In one embodiment, a siNA molecule of the invention comprises a sense region and an antisense region, wherein the antisense region comprises a nucleotide sequence that is complementary to a nucleotide sequence or a portion thereof of RNA encoded by a target gene and the sense region comprises a nucleotide sequence that is complementary to the antisense region.

[0032] In one embodiment, a siNA molecule of the invention is assembled from two separate oligonucleotide fragments wherein one fragment comprises the sense region and the second fragment comprises the antisense region of the siNA molecule. In another embodiment, the sense region is connected to the antisense region via a linker molecule, which can be a polynucleotide linker or a non-nucleotide linker.

[0033] In one embodiment, a siNA molecule of the invention comprises a sense region and antisense region, wherein pyrimidine nucleotides in the sense region comprises 2′-O-methyl pyrimidine nucleotides and purine nucleotides in the sense region comprise 2′-deoxy purine nucleotides. In one embodiment, a siNA molecule of the invention comprises a sense region and antisense region, wherein pyrimidine nucleotides present in the sense region comprise 2′-deoxy-2′-fluoro pyrimidine nucleotides and wherein purine nucleotides present in the sense region comprise 2′-deoxy purine nucleotides.

[0034] In one embodiment, a siNA molecule of the invention comprises a sense region and antisense region, wherein the pyrimidine nucleotides when present in said antisense region are 2′-deoxy-2′-fluoro pyrimidine nucleotides and the purine nucleotides when present in said antisense region are 2′-O-methyl purine nucleotides.

[0035] In one embodiment, a siNA molecule of the invention comprises a sense region and antisense region, wherein the pyrimidine nucleotides when present in said antisense region are 2′-deoxy-2′-fluoro pyrimidine nucleotides and wherein the purine nucleotides when present in said antisense region comprise 2′-deoxy-purine nucleotides.

[0036] In one embodiment, a siNA molecule of the invention comprises a sense region and antisense region, wherein the sense region includes a terminal cap moiety at the 5′-end, the 3′-end, or both of the 5′ and 3′ ends of the sense region. In another embodiment, the terminal cap moiety is an inverted deoxy abasic moiety or any other cap moiety such as those shown in FIG. 22.

[0037] In one embodiment, a siNA molecule of the invention has RNAi activity that modulates expression of RNA encoded by a gene. Because many genes can share some degree of sequence homology with each other, siNA molecules can be designed to target a class of genes (and associated receptor or ligand genes) or alternately specific genes by selecting sequences that are either shared amongst different gene targets or alternatively that are unique for a specific gene target. Therefore, in one embodiment, the siNA molecule can be designed to target conserved regions of a RNA sequence having sequence homology between several genes so as to target several genes or gene families (e.g., different gene isoforms, splice variants, mutant genes etc.) with one siNA molecule. In another embodiment, the siNA molecule can be designed to target a sequence that is unique to a specific RNA sequence of a specific gene due to the high degree of specificity that the siNA molecule requires to mediate RNAi activity.

[0038] In one embodiment, a siNA of the invention is used to inhibit the expression of genes or a gene family, wherein the genes or gene family sequences share sequence homology. Such homologous sequences can be identified as is known in the art, for example using sequence alignments. siNA molecules can be designed to target such homologous sequences, for example using perfectly complementary sequences or by incorporating non-canonical base pairs (e.g., mismatches and/or wobble base pairs, that can provide additional target sequences. In instances where mismatches are identified, non-canonical base pairs (e.g., mismatches and/or wobble bases) can be used to generate siNA molecules that target more than one gene sequence. In a non-limiting example, non-canonical base pairs such as UU and CC base pairs are used to generate siNA molecules that are capable of targeting differing VEGF and/or VEGFR sequences (e.g., VEGFR1 and VEGFR2). As such, one advantage of using siNAs of the invention is that a single siNA can be designed to include a nucleic acid sequence that is complementary to the nucleotide sequence that is conserved between the VEGF receptors (i.e., VEGFR1, VEGFR2, and/or VEGFR3) such that the siNA can interact with RNAs of the receptors and mediate RNAi to achieve inhibition of expression of the VEGF receptors. In this approach, a single siNA can be used to inhibit expression of more than one VEGF receptor instead of using more than one siNA molecule to target the different receptors.

[0039] In one embodiment, the invention features a siNA molecule having RNAi activity against a target RNA, wherein the siNA molecule comprises a sequence complementary to any RNA having target gene encoding sequence, such as those sequences having GenBank Accession Nos. referred to herein. In another embodiment, the invention features a siNA molecule having RNAi activity against a target RNA, wherein the siNA molecule comprises a sequence complementary to an RNA having other sequences, for example mutant genes as are known in the art to be associated with a disease, condition, trait, genotype or phenotype. Chemical modifications as shown in Tables I and IV or otherwise described herein can be applied to any siNA construct of the invention. In another embodiment, a siNA molecule of the invention includes nucleotide sequence that can interact with nucleotide sequence of a target gene and thereby mediate silencing of target gene expression, for example, wherein the siNA mediates regulation of target gene expression by cellular processes that modulate the chromatin structure or methylation patterns of the target gene and prevent transcription of the target gene.

[0040] In one embodiment, siNA molecules of the invention are used to down regulate or inhibit the expression of target proteins arising from haplotype polymorphisms that are associated with a disease, condition, trait, genotype or phenotype, (e.g., associated with a gain of function). Analysis of target genes, or target protein or RNA levels can be used to identify subjects with such polymorphisms or those subjects who are at risk of developing a disease, condition, trait, genotype or phenotype. These subjects are amenable to treatment, for example, treatment with siNA molecules of the invention and any other composition useful in treating a diseases, conditions, traits, genotypes or phenotypes related to target gene expression or expressed protein activity. As such, analysis of target protein or RNA levels can be used to determine treatment type and the course of therapy in treating a subject. Monitoring of protein or RNA levels can be used to predict treatment outcome and to determine the efficacy of compounds and compositions that modulate the level and/or activity of certain proteins associated with a disease, condition, trait, genotype or phenotype.

[0041] In one embodiment, the antisense region of a siNA molecule of the invention comprises sequence complementary to a portion of a gene transcript having sequence unique to a particular disease, condition, trait, genotype or phenotype related allele, such as sequence comprising a SNP associated with the disease, condition, trait, genotype or phenotype specific allele. As such, the antisense region of a siNA molecule of the invention can comprise sequence complementary to sequences that are unique to a particular allele to provide specificity in mediating selective RNAi against the disease, condition, trait, genotype or phenotype related allele.

[0042] In another embodiment, the invention features a siNA molecule comprising nucleotide sequence, for example, nucleotide sequence in the antisense region of the siNA molecule that is complementary to a nucleotide sequence or portion of sequence of a target gene. In another embodiment, the invention features a siNA molecule comprising a region, for example, the antisense region of the siNA construct, complementary to a sequence comprising a target gene sequence or a portion thereof.

[0043] In one embodiment of the invention a siNA molecule comprises an antisense strand having about 19 to about 29 (e.g., about 19, 20, 21, 22, 23, 24, 25, 26, 27, 28, or 29) nucleotides, wherein the antisense strand is complementary to a RNA sequence encoding a target protein, and wherein said siNA further comprises a sense strand having about 19 to about 29 (e.g., about 19, 20, 21, 22, 23, 24, 25, 26, 27, 28, or 29) nucleotides, and wherein said sense strand and said antisense strand are distinct nucleotide sequences with at least about 19 complementary nucleotides.

[0044] In another embodiment of the invention a siNA molecule of the invention comprises an antisense region having about 19 to about 29 (e.g., about 19, 20, 21, 22, 23, 24, 25, 26, 27, 28, or 29) nucleotides, wherein the antisense region is complementary to a RNA sequence encoding a target protein, and wherein said siNA further comprises a sense region having about 19 to about 29 or more (e.g., about 19, 20, 21, 22, 23, 24, 25, 26, 27, 28, 29 or more) nucleotides, wherein said sense region and said antisense region comprise a linear molecule with at least about 19 complementary nucleotides.

[0045] In one embodiment of the invention a siNA molecule comprises an antisense strand comprising a nucleotide sequence that is complementary to a nucleotide sequence or a portion thereof encoding a target protein. The siNA further comprises a sense strand, wherein said sense strand comprises a nucleotide sequence of a target gene or a portion thereof.

[0046] In another embodiment, a siNA molecule comprises an antisense region comprising a nucleotide sequence that is complementary to a nucleotide sequence encoding a target protein or a portion thereof. The siNA molecule further comprises a sense region, wherein said sense region comprises a nucleotide sequence of a target gene or a portion thereof.

[0047] In one embodiment, a siNA molecule of the invention has RNAi activity that modulates expression of RNA encoded by a target gene. Because certain genes can share some degree of sequence homology with each other, siNA molecules can be designed to target a class of genes or alternately specific genes (e.g., polymorphic variants) by selecting sequences that are either shared amongst different targets or alternatively that are unique for a specific target. Therefore, in one embodiment, the siNA molecule can be designed to target conserved regions of RNA sequence having homology between several gene variants so as to target a class of genes with one siNA molecule. Accordingly, in one embodiment, the siNA molecule of the invention modulates the expression of one or both alleles of a target gene in a subject. In another embodiment, the siNA molecule can be designed to target a sequence that is unique to a specific target RNA sequence (e.g., a single allele or associated SNP) due to the high degree of specificity that the siNA molecule requires to mediate RNAi activity.

[0048] In one embodiment, nucleic acid molecules of the invention that act as mediators of the RNA interference gene silencing response are double-stranded nucleic acid molecules. In another embodiment, the siNA molecules of the invention consist of duplexes containing about 19 base pairs between oligonucleotides comprising about 19 to about 25 (e.g., about 19, 20, 21, 22, 23, 24, or 25) nucleotides. In yet another embodiment, siNA molecules of the invention comprise duplexes with overhanging ends of about 1 to about 3 (e.g., about 1, 2, or 3) nucleotides, for example, about 21-nucleotide duplexes with about 19 base pairs and 3′-terminal mononucleotide, dinucleotide, or trinucleotide overhangs.

[0049] One aspect of the invention features a double-stranded short interfering nucleic acid (siNA) molecule that down-regulates expression of a target gene. In one embodiment, a double stranded siNA molecule comprises one or more chemical modifications and each strand of the double-stranded siNA is about 21 nucleotides long. In one embodiment, the double-stranded siNA molecule does not contain any ribonucleotides. In another embodiment, the double-stranded siNA molecule comprises one or more ribonucleotides. In one embodiment, each strand of the double-stranded siNA molecule comprises about 19 to about 29 (e.g., about 19, 20, 21, 22, 23, 24, 25, 26, 27, 28, or 29) nucleotides, wherein each strand comprises about 19 nucleotides that are complementary to the nucleotides of the other strand. In one embodiment, one of the strands of the double-stranded siNA molecule comprises a nucleotide sequence that is complementary to a nucleotide sequence or a portion thereof of the target gene, and the second strand of the double-stranded siNA molecule comprises a nucleotide sequence substantially similar to the nucleotide sequence of the target gene or a portion thereof.

[0050] In another embodiment, the invention features a double-stranded short interfering nucleic acid (siNA) molecule that down-regulates expression of a target gene comprising an antisense region, wherein the antisense region comprises a nucleotide sequence that is complementary to a nucleotide sequence of the target gene or a portion thereof, and a sense region, wherein the sense region comprises a nucleotide sequence substantially similar to the nucleotide sequence of the target gene or a portion thereof. In one embodiment, the antisense region and the sense region each comprise about 19 to about 23 (e.g., about 19, 20, 21, 22, or 23) nucleotides, wherein the antisense region comprises about 19 nucleotides that are complementary to nucleotides of the sense region.

[0051] In another embodiment, the invention features a double-stranded short interfering nucleic acid (siNA) molecule that down-regulates expression of a target gene comprising a sense region and an antisense region, wherein the antisense region comprises a nucleotide sequence that is complementary to a nucleotide sequence of RNA encoded by the target gene or a portion thereof and the sense region comprises a nucleotide sequence that is complementary to the antisense region.

[0052] In one embodiment, a siNA of the invention is used to inhibit the expression of more than one gene, wherein the genes share some degree of sequence homology. Such homologous sequences can be identified as is known in the art, for example using sequence alignments. siNA molecules can be designed to target such homologous sequences, for example using perfectly complementary sequences or by incorporating mismatches and/or wobble base pairs that can provide additional target sequences One advantage of using siNAs of the invention is that a single siNA can be designed to include nucleic acid sequence that is complementary to a nucleotide sequence that is conserved between the genes such that the siNA can interact with RNA transcripts of the genes and mediate RNAi to achieve inhibition of expression of the genes. In this approach, a single siNA can be used to inhibit expression of more than one gene, thereby obviating the need to use more than one siNA molecule to target the different genes. The different genes can comprise, for example, a cytokine and its corresponding receptor(s).

[0053] In one embodiment, the invention features a method of designing a single siNA to inhibit the expression of two or more genes comprising designing a siNA having nucleotide sequence that is complementary to nucleotide sequence encoded by or present in the genes or a portion thereof, wherein the siNA mediates RNAi to inhibit the expression of the genes. For example, a single siNA can inhibit the expression of two genes by binding to conserved or homologous sequence present in RNA encoded by both genes or a portion thereof.

[0054] In one embodiment, nucleic acid molecules of the invention that act as mediators of the RNA interference gene silencing response are double-stranded nucleic acid molecules. In another embodiment, the siNA molecules of the invention consist of duplexes containing about 19 base pairs between oligonucleotides comprising about 19 to about 25 (e.g., about 19, 20, 21, 22, 23, 24, or 25) nucleotides. In yet another embodiment, siNA molecules of the invention comprise duplexes with overhanging ends of about 1 to about 3 (e.g., about 1, 2, or 3) nucleotides, for example, about 21-nucleotide duplexes with about 19 base pairs and 3′-terminal mononucleotide, dinucleotide, or trinucleotide overhangs.

[0055] In one embodiment, the invention features one or more chemically-modified siNA constructs having specificity for nucleic acid molecules that express or encode a protein sequence, such as RNA or DNA encoding a protein sequence. Non-limiting examples of such chemical modifications include without limitation phosphorothioate internucleotide linkages, 2′-deoxyribonucleotides, 2′-O-methyl ribonucleotides, 2′-deoxy-2′-fluoro ribonucleotides, “universal base” nucleotides, “acyclic” nucleotides, 5-C-methyl nucleotides, and terminal glyceryl and/or inverted deoxy abasic residue incorporation. These chemical modifications, when used in various siNA constructs, are shown to preserve RNAi activity in cells while at the same time, dramatically increasing the serum stability of these compounds.

[0056] In one embodiment, a siNA molecule of the invention does not contain any ribonucleotides. In another embodiment, a siNA molecule of the invention comprises one or more ribonucleotides.

[0057] In one embodiment, the invention features the use of compounds or compositions that inhibit the activity of double stranded RNA binding proteins (dsRBPs, see for example Silhavy et al., 2003, Journal of General Virology, 84, 975-980). Non-limiting examples of compounds and compositions that can be used to inhibit the activity of dsRBPs include but are not limited to small molecules and nucleic acid aptamers that bind to or interact with the dsRBPs and consequently reduce dsRBP activity and/or siNA molecules that target nucleic acid sequences encoding dsRBPs. The use of such compounds and compositions is expected to improve the activity of siNA molecules in biological systems in which dsRBPs can abrogate or suppress the efficacy of siNA mediated RNA interference, such as where dsRBPs are expressed during viral infection of a cell to escape RNAi surveillance. Therefore, the use of agents that inhibit dsRBP activity is preferred in those instances where RNA interference activity can be improved via the abrogation or suppression of dsRBP activity. Such anti-dsRBP agents can be administered alone or can be co-administered with siNA molecules of the invention, or can be used to pretreat cells or a subject before siNA administration. In another embodiment, anti-dsRBP agents are used to treat viral infection, such as HCV, HBV, or HIV infection with or without siNA molecules of the invention.

[0058] In one embodiment, the invention features a double-stranded short interfering nucleic acid (siNA) molecule that down-regulates expression of a gene, wherein one of the strands of the double-stranded siNA molecule comprises a nucleotide sequence that is complementary to a nucleotide sequence of the gene or RNA encoded by the gene or a portion thereof, and wherein the second strand of the double-stranded siNA molecule comprises a nucleotide sequence substantially similar to the nucleotide sequence of the gene or RNA encoded by the gene or a portion thereof.

[0059] In one embodiment, the invention features a double-stranded short interfering nucleic acid (siNA) molecule that down-regulates expression of a gene, wherein each strand of the siNA molecule comprises about 19 to about 23 nucleotides, and wherein each strand comprises at least about 19 nucleotides that are complementary to the nucleotides of the other strand.

[0060] In one embodiment, the invention features a double-stranded short interfering nucleic acid (siNA) molecule that down-regulates expression of a gene, wherein the siNA molecule comprises an antisense region comprising a nucleotide sequence that is complementary to a nucleotide sequence of the gene or RNA encoded by the gene or a portion thereof, and wherein the siNA further comprises a sense region, wherein the sense region comprises a nucleotide sequence substantially similar to the nucleotide sequence of the gene or RNA encoded by the gene or a portion thereof.

[0061] In one embodiment, the invention features a double-stranded short interfering nucleic acid (siNA) molecule that inhibits the expression of a target gene by mediating RNA interference (RNAi) process, wherein the siNA molecule comprises no ribonucleotides and wherein each strand of the double-stranded siNA molecule comprises about 21 nucleotides.

[0062] In one embodiment, the invention features a double-stranded short interfering nucleic acid (siNA) molecule that inhibits the replication of a virus (e.g, as mammalian virus, plant virus, hepatitis C virus, human immunodeficiency virus, hepatitis B virus, herpes simplex virus, cytomegalovirus, human papilloma virus, respiratory syncytial virus, or influenza virus), wherein the siNA molecule does not require the presence of a ribonucleotide within the siNA molecule for the inhibition of replication of the virus and each strand of the double-stranded siNA molecule comprises about 21 nucleotides.

[0063] In one embodiment, the invention features a double-stranded short interfering nucleic acid (siNA) molecule that down-regulates expression of a gene, wherein the siNA molecule comprises a sense region and an antisense region and wherein the antisense region comprises a nucleotide sequence that is complementary to a nucleotide sequence or a portion thereof of RNA encoded by the gene and the sense region comprises a nucleotide sequence that is complementary to the antisense region or a portion thereof, and wherein the purine nucleotides present in the antisense region comprise 2′-deoxy-purine nucleotides. In another embodiment, the purine nucleotides present in the antisense region comprise 2′-O-methyl purine nucleotides. In either of the above embodiments, the antisense region comprises a phosphorothioate internucleotide linkage at the 3′ end of the antisense region. In an alternative embodiment, the antisense region comprises a glyceryl modification at the 3′ end of the antisense region. In another embodiment of any of the above described siNA molecules, any nucleotides present in a non-complementary region of the antisense strand (e.g., overhang region) are 2′-deoxy nucleotides.

[0064] In one embodiment, the invention features a double-stranded short interfering nucleic acid (siNA) molecule that down-regulates expression of a gene, wherein the siNA molecule is assembled from two separate oligonucleotide fragments each comprising 21 nucleotides, wherein one fragment comprises the sense region and the second fragment comprises the antisense region of the siNA molecule, and wherein about 19 nucleotides of each fragment of the siNA molecule are base-paired to the complementary nucleotides of the other fragment of the siNA molecule and wherein at least two 3′ terminal nucleotides of each fragment of the siNA molecule are not base-paired to the nucleotides of the other fragment of the siNA molecule. In one embodiment, each of the two 3′ terminal nucleotides of each fragment of the siNA molecule is a 2′-deoxy-pyrimidine nucleotide, such as 2′-deoxy-thymidine. In another embodiment, all 21 nucleotides of each fragment of the siNA molecule are base-paired to the complementary nucleotides of the other fragment of the siNA molecule. In another embodiment, about 19 nucleotides of the antisense region are base-paired to the nucleotide sequence or a portion thereof of the RNA encoded by the gene. In another embodiment, 21 nucleotides of the antisense region are base-paired to the nucleotide sequence or a portion thereof of the RNA encoded by the gene. In any of the above embodiments, the 5′-end of the fragment comprising said antisense region can optionally include a phosphate group.

[0065] In one embodiment, the invention features a double-stranded short interfering nucleic acid (siNA) molecule that inhibits the expression of a RNA sequence (e.g., wherein said target RNA sequence is encoded by a gene or a gene involved in a pathway of gene expression), wherein the siNA molecule does not contain any ribonucleotides and wherein each strand of the double-stranded siNA molecule is about 21 nucleotides long. Examples of non-ribonucleotide containing siNA constructs are combinations of stabilization chemistries shown in Table IV in any combination of Sense/Antisense chemistries, e.g., Stab 7/8, Stab 7/11, Stab 8/8, Stab 18/8, Stab 18/11, Stab 12/13, Stab 7/13, Stab 18/13, Stab 7/19, Stab 8/19, Stab 18/19, Stab 7/20, Stab 8/20, or Stab 18/20.

[0066] In one embodiment, the invention features a chemically synthesized double stranded RNA molecule that directs cleavage of a target RNA via RNA interference, wherein each strand of said RNA molecule is about 21 to about 23 nucleotides in length; one strand of the RNA molecule comprises nucleotide sequence having sufficient complementarity to the target RNA for the RNA molecule to direct cleavage of the target RNA via RNA interference; and wherein at least one strand of the RNA molecule comprises one or more chemically modified nucleotides described herein, such as deoxynucleotides, 2′-O-methyl nucleotides, 2′-deoxy-2′-fluoro nucleotides, 2′-O-methoxyethyl nucleotides etc.

[0067] In one embodiment, the invention features a medicament comprising a siNA molecule of the invention.

[0068] In one embodiment, the invention features an active ingredient comprising a siNA molecule of the invention.

[0069] In one embodiment, the invention features the use of a double-stranded short interfering nucleic acid (siNA) molecule to down-regulate expression of a target gene, wherein the siNA molecule comprises one or more chemical modifications and each strand of the double-stranded siNA is about 21 nucleotides long.

[0070] In one embodiment, the invention features the use of a double-stranded short interfering nucleic acid (siNA) molecule to down-regulate expression of a target gene, wherein the siNA molecule comprises one or more chemical modifications and each strand of the double-stranded siNA is about 18 to about 28 or more (e.g., 17, 18, 19, 20, 21, 22, 23, 24, 25, 26, 27, 28 or more) nucleotides long.

[0071] The invention features a double-stranded short interfering nucleic acid (siNA) molecule that inhibits expression of a gene, wherein one of the strands of the double-stranded siNA molecule is an antisense strand which comprises nucleotide sequence that is complementary to nucleotide sequence of a RNA encoded by the gene or a portion thereof, the other strand is a sense strand which comprises nucleotide sequence that is complementary to a nucleotide sequence of the antisense strand and wherein a majority of the pyrimidine nucleotides present in the double-stranded siNA molecule comprises a sugar modification.

[0072] In one embodiment, the nucleotide sequence of the antisense strand of a siNA molecule of the invention is complementary to the nucleotide sequence of a RNA which encodes a protein or a portion thereof. In one embodiment, each strand of the siNA molecule comprises about 19 to about 29 (e.g., about 18, 19, 20, 21, 22, 23, 24, 25, 26, 27, 28, 29 or 30) nucleotides, and each strand comprises at least about 19 nucleotides that are complementary to the nucleotides of the other strand.

[0073] In one embodiment, a siNA molecule of the invention is assembled from two oligonucleotide fragments, wherein one fragment comprises the nucleotide sequence of the antisense strand of the siNA molecule and a second fragment comprises nucleotide sequence of the sense region of the siNA molecule. In another embodiment, the sense strand is connected to the antisense strand via a linker molecule, such as a polynucleotide linker or a non-nucleotide linker.

[0074] In one embodiment, of a siNA molecule of the invention, the pyrimidine nucleotides present in the sense strand are 2′-deoxy-2′-fluoro pyrimidine nucleotides and the purine nucleotides present in the sense region are 2′-deoxy purine nucleotides. In another embodiment, the pyrimidine nucleotides present in the sense strand are 2′-deoxy-2′-fluoro pyrimidine nucleotides and the purine nucleotides present in the sense region are 2′-O-methyl purine nucleotides. In one embodiment, the sense strand comprises a 3′-end and a 5′-end, wherein a terminal cap moiety (e.g., an inverted deoxy abasic moiety) is present at the 5′-end, the 3′-end, or both of the 5′ and 3′ ends of the sense strand. In one embodiment, the antisense strand comprises one or more 2′-deoxy-2′-fluoro pyrimidine nucleotides and one or more 2′-O-methyl purine nucleotides. In one embodiment, the pyrimidine nucleotides present in the antisense strand are 2′-deoxy-2′-fluoro pyrimidine nucleotides and any purine nucleotides present in the antisense strand are 2′-O-methyl purine nucleotides. In one embodiment, the antisense strand comprises a phosphorothioate internucleotide linkage at the 3′ end of the antisense strand. In another embodiment, the antisense strand comprises a glyceryl modification at the 3′ end. In another embodiment, the 5′-end of the antisense strand optionally includes a phosphate group.

[0075] In one embodiment, the invention features a double-stranded short interfering nucleic acid (siNA) molecule that down-regulates expression of a gene, wherein one of the strands of the double-stranded siNA molecule is an antisense strand which comprises nucleotide sequence that is complementary to nucleotide sequence of RNA encoded by a gene or a portion thereof, the other strand is a sense strand which comprises nucleotide sequence that is complementary to a nucleotide sequence of the antisense strand and wherein a majority of the pyrimidine nucleotides present in the double-stranded siNA molecule comprises a sugar modification, and wherein the nucleotide sequence of the antisense strand is complementary to a nucleotide sequence of the 5′-untranslated region or a portion thereof of the RNA. In another embodiment, the nucleotide sequence of the antisense strand is complementary to a nucleotide sequence of the RNA or a portion thereof.

[0076] In one embodiment, the invention features a double-stranded short interfering nucleic acid (siNA) molecule that inhibits expression of a gene, wherein one of the strands of the double-stranded siNA molecule is an antisense strand which comprises nucleotide sequence that is complementary to nucleotide sequence of a RNA or a portion thereof, the other strand is a sense strand which comprises nucleotide sequence that is complementary to a nucleotide sequence of the antisense strand and wherein a majority of the pyrimidine nucleotides present in the double-stranded siNA molecule comprises a sugar modification, and wherein each of the two strands of the siNA molecule comprises 21 nucleotides. In one embodiment, about 19 nucleotides of each strand of the siNA molecule are base-paired to the complementary nucleotides of the other strand of the siNA molecule and at least two 3′ terminal nucleotides of each strand of the siNA molecule are not base-paired to the nucleotides of the other strand of the siNA molecule. In one embodiment, each of the two 3′ terminal nucleotides of each fragment of the siNA molecule are 2′-deoxy-pyrimidines, such as 2′-deoxy-thymidine. In another embodiment, each strand of the siNA molecule is base-paired to the complementary nucleotides of the other strand of the siNA molecule. In one embodiment, about 19 nucleotides of the antisense strand are base-paired to the nucleotide sequence of the RNA or a portion thereof. In another embodiment, 21 nucleotides of the antisense strand are base-paired to the nucleotide sequence of the RNA or a portion thereof.

[0077] In one embodiment, the invention features a composition comprising a siNA molecule of the invention and a pharmaceutically acceptable carrier or diluent.

[0078] In one embodiment, the invention features a method of increasing the stability of a siNA molecule against cleavage by ribonucleases comprising introducing at least one modified nucleotide into the siNA molecule, wherein the modified nucleotide is a 2′-deoxy-2′-fluoro nucleotide. In another embodiment, all pyrimidine nucleotides present in the siNA are 2′-deoxy-2′-fluoro pyrimidine nucleotides. In another embodiment, the modified nucleotides in the siNA include at least one 2′-deoxy-2′-fluoro cytidine or 2′-deoxy-2′-fluoro uridine nucleotide. In another embodiment, the modified nucleotides in the siNA include at least one 2′-fluoro cytidine and at least one 2′-deoxy-2′-fluoro uridine nucleotides. In another embodiment, all uridine nucleotides present in the siNA are 2′-deoxy-2′-fluoro uridine nucleotides. In another embodiment, all cytidine nucleotides present in the siNA are 2′-deoxy-2′-fluoro cytidine nucleotides. In another embodiment, all adenosine nucleotides present in the siNA are 2′-deoxy-2′-fluoro adenosine nucleotides. In another embodiment, all guanosine nucleotides present in the siNA are 2′-deoxy-2′-fluoro guanosine nucleotides. The siNA can further comprise at least one modified internucleotidic linkage, such as phosphorothioate linkage. In another embodiment, the 2′-deoxy-2′-fluoronucleotides are present at specifically selected locations in the siNA that are sensitive to cleavage by ribonucleases, such as locations having pyrimidine nucleotides.

[0079] In one embodiment, the invention features the use of a double-stranded short interfering nucleic acid (siNA) molecule that inhibits expression of a gene, wherein one of the strands of the double-stranded siNA molecule is an antisense strand which comprises nucleotide sequence that is complementary to nucleotide sequence of a RNA or a portion thereof, the other strand is a sense strand which comprises nucleotide sequence that is complementary to a nucleotide sequence of the antisense strand and wherein a majority of the pyrimidine nucleotides present in the double-stranded siNA molecule comprises a sugar modification.

[0080] In one embodiment, the invention features a short interfering nucleic acid (siNA) molecule comprising a double-stranded structure that down-regulates expression of a target nucleic acid, wherein the siNA molecule does not require a 2′-hydroxyl group containing ribonucleotide, each strand of the double-stranded structure of the siNA molecule comprises about 21 nucleotides and the siNA molecule comprises nucleotide sequence having complementarity to nucleotide sequence of the target nucleic acid or a portion thereof. The target nucleic acid can be an endogenous gene, an exogenous gene, a viral nucleic acid, or a RNA, such as a mammalian gene, plant gene, viral gene, fungal gene, bacterial gene, plant viral gene, or mammalian viral gene. Examples of mammalian viral gene include hepatitis C virus, human immunodeficiency virus, hepatitis B virus, herpes simplex virus, cytomegalovirus, human papilloma virus, respiratory syncytial virus, influenza virus, and severe acute respiratory syndrome virus (SARS).

[0081] In one embodiment, a siNA molecule of the invention comprises a sense region and an antisense region wherein the antisense region comprises the nucleotide sequence that is complementary to a nucleotide sequence or a portion thereof of the target nucleic acid and the sense region comprises a nucleotide sequence that is complementary to nucleotide sequence of the antisense region or a portion thereof.

[0082] In one embodiment, a siNA molecule of the invention is assembled from two separate oligonucleotide fragments wherein one fragment comprises the sense region and the second fragment comprises the antisense region of the siNA molecule. The sense region can be connected to the antisense region via a linker molecule, such as a polynucleotide linker or non-nucleotide linker. In another embodiment, each sense region and antisense region comprise about 21 nucleotides in length. In another embodiment, about 19 nucleotides of each fragment of the siNA molecule are base-paired to the complementary nucleotides of the other fragment of the siNA molecule and at least two 3′ terminal nucleotides of each fragment of the siNA molecule are not base-paired to the nucleotides of the other fragment of the siNA molecule. In another embodiment, each of the two 3′ terminal nucleotides of each fragment of the siNA molecule are 2′-deoxy-pyrimidines, such as the thymidine. In another embodiment, all 21 nucleotides of each fragment of the siNA molecule are base-paired to the complementary nucleotides of the other fragment of the siNA molecule. In another embodiment, about 19 nucleotides of the antisense region of the siNA molecule are base-paired to the nucleotide sequence or a portion thereof of the target nucleic acid. In another embodiment, 21 nucleotides of the antisense region of the siNA molecule are base-paired to the nucleotide sequence or a portion thereof of the target nucleic acid. In another embodiment, the 5′-end of the fragment comprising the antisense region optionally includes a phosphate group.

[0083] In one embodiment, a siNA molecule of the invention comprises nucleotide sequence having complementarity to nucleotide sequence of RNA or a portion thereof encoded by the target nucleic acid or a portion thereof.

[0084] In one embodiment, a siNA molecule of the invention comprises a sense region and an antisense region, wherein the pyrimidine nucleotides when present in the sense region are 2′-O-methylpyrimidine nucleotides and wherein the purine nucleotides when present in the sense region are 2′-deoxy purine nucleotides.

[0085] In one embodiment, a siNA molecule of the invention comprises a sense region and an antisense region, wherein the pyrimidine nucleotides when present in the sense region are 2′-deoxy-2′-fluoro pyrimidine nucleotides and wherein the purine nucleotides when present in the sense region are 2′-deoxy purine nucleotides.

[0086] In one embodiment, a siNA molecule of the invention comprises a sense region and an antisense region, wherein the sense region includes a terminal cap moiety at the 5′-end, the 3′-end, or both of the 5′ and 3′ ends. The cap moiety can be an inverted deoxy abasic moiety, an inverted deoxy thymidine moiety, or a thymidine moiety.

[0087] In one embodiment, a siNA molecule of the invention comprises a sense region and an antisense region, wherein the pyrimidine nucleotides when present in the antisense region are 2′-deoxy-2′-fluoro pyrimidine nucleotides and the purine nucleotides when present in the antisense region are 2′-O-methyl purine nucleotides.

[0088] In one embodiment, a siNA molecule of the invention comprises a sense region and an antisense region, wherein the pyrimidine nucleotides when present in the antisense region are 2′-deoxy-2′-fluoro pyrimidine nucleotides and wherein the purine nucleotides when present in the antisense region comprise 2′-deoxy-purine nucleotides.

[0089] In one embodiment, a siNA molecule of the invention comprises a sense region and an antisense region, wherein the antisense region comprises a phosphate backbone modification at the 3′ end of the antisense region. The phosphate backbone modification can be a phosphorothioate.

[0090] In one embodiment, a siNA molecule of the invention comprises a sense region and an antisense region, wherein the antisense region comprises a glyceryl modification at the 3′ end of the antisense region.

[0091] In one embodiment, a siNA molecule of the invention comprises a sense region and an antisense region, wherein each of sense and the antisense regions of the siNA molecule comprise about 21 nucleotides.

[0092] In a non-limiting example, the introduction of chemically-modified nucleotides into nucleic acid molecules provides a powerful tool in overcoming potential limitations of in vivo stability and bioavailability inherent to native RNA molecules that are delivered exogenously. For example, the use of chemically-modified nucleic acid molecules can enable a lower dose of a particular nucleic acid molecule for a given therapeutic effect since chemically-modified nucleic acid molecules tend to have a longer half-life in serum. Furthermore, certain chemical modifications can improve the bioavailability of nucleic acid molecules by targeting particular cells or tissues and/or improving cellular uptake of the nucleic acid molecule. Therefore, even if the activity of a chemically-modified nucleic acid molecule is reduced as compared to a native nucleic acid molecule, for example, when compared to an all-RNA nucleic acid molecule, the overall activity of the modified nucleic acid molecule can be greater than that of the native molecule due to improved stability and/or delivery of the molecule. Unlike native unmodified siNA, chemically-modified siNA can also minimize the possibility of activating interferon activity in humans.

[0093] In any of the embodiments of siNA molecules described herein, the antisense region of a siNA molecule of the invention can comprise a phosphorothioate internucleotide linkage at the 3′-end of said antisense region. In any of the embodiments of siNA molecules described herein, the antisense region can comprise about one to about five phosphorothioate internucleotide linkages at the 5′-end of said antisense region. In any of the embodiments of siNA molecules described herein, the 3′-terminal nucleotide overhangs of a siNA molecule of the invention can comprise ribonucleotides or deoxyribonucleotides that are chemically-modified at a nucleic acid sugar, base, or backbone. In any of the embodiments of siNA molecules described herein, the 3′-terminal nucleotide overhangs can comprise one or more universal base ribonucleotides. In any of the embodiments of siNA molecules described herein, the 3′-terminal nucleotide overhangs can comprise one or more acyclic nucleotides.

[0094] One embodiment of the invention provides an expression vector comprising a nucleic acid sequence encoding at least one siNA molecule of the invention in a manner that allows expression of the nucleic acid molecule. Another embodiment of the invention provides a mammalian cell comprising such an expression vector. The mammalian cell can be a human cell. The siNA molecule of the expression vector can comprise a sense region and an antisense region. The antisense region can comprise sequence complementary to an RNA or DNA sequence encoding a protein or polypeptide and the sense region can comprise sequence complementary to the antisense region. The siNA molecule can comprise two distinct strands having complementary sense and antisense regions. The siNA molecule can comprise a single strand having complementary sense and antisense regions.

[0095] In one embodiment, the invention features a chemically-modified short interfering nucleic acid (siNA) molecule capable of mediating RNA interference (RNAi) inside a cell or reconstituted in vitro system, wherein the chemical modification comprises one or more (e.g., about 1, 2, 3, 4, 5, 6, 7, 8, 9, 10, or more) nucleotides comprising a backbone modified internucleotide linkage having Formula I: [chemical structure]
wherein each R₁ and R₂ is independently any nucleotide, non-nucleotide, or polynucleotide which can be naturally-occurring or chemically-modified, each X and Y is independently O, S, N, alkyl, or substituted alkyl, each Z and W is independently O, S, N, alkyl, substituted alkyl, O-alkyl, S-alkyl, alkaryl, or aralkyl, and wherein W, X, Y, and Z are optionally not all O. In another embodiment, a backbone modification of the invention comprises a phosphonoacetate and/or thiophosphonoacetate internucleotide linkage (see for example Sheehan et al., 2003, Nucleic Acids Research, 31, 4109-4118).

[0096] The chemically-modified internucleotide linkages having Formula I, for example, wherein any Z, W, X, and/or Y independently comprises a sulphur atom, can be present in one or both oligonucleotide strands of the siNA duplex, for example, in the sense strand, the antisense strand, or both strands. The siNA molecules of the invention can comprise one or more (e.g. about 1, 2, 3, 4, 5, 6, 7, 8, 9, 10, or more) chemically-modified internucleotide linkages having Formula I at the 3′-end, the 5′-end, or both of the 3′ and 5′-ends of the sense strand, the antisense strand, or both strands. For example, an exemplary siNA molecule of the invention can comprise about 1 to about 5 or more (e.g., about 1, 2, 3, 4, 5, or more) chemically-modified internucleotide linkages having Formula I at the 5′-end of the sense strand, the antisense strand, or both strands. In another non-limiting example, an exemplary siNA molecule of the invention can comprise one or more (e.g., about 1, 2, 3, 4, 5, 6, 7, 8, 9, 10, or more) pyrimidine nucleotides with chemically-modified internucleotide linkages having Formula I in the sense strand, the antisense strand, or both strands. In yet another non-limiting example, an exemplary siNA molecule of the invention can comprise one or more (e.g., about 1, 2, 3, 4, 5, 6, 7, 8, 9, 10, or more) purine nucleotides with chemically-modified internucleotide linkages having Formula I in the sense strand, the antisense strand, or both strands. In another embodiment, a siNA molecule of the invention having internucleotide linkage(s) of Formula I also comprises a chemically-modified nucleotide or non-nucleotide having any of Formulae I-VII.

[0097] In one embodiment, the invention features a chemically-modified short interfering nucleic acid (siNA) molecule capable of mediating RNA interference (RNAi) inside a cell or reconstituted in vitro system, wherein the chemical modification comprises one or more (e.g., about 1, 2, 3, 4, 5, 6, 7, 8, 9, 10, or more) nucleotides or non-nucleotides having Formula II: [chemical structure]
wherein each R₃, R₄, R₅, R₆, R₇, R₈, R₁₀, R₁₁ and R₁₂ is independently H, OH, alkyl, substituted alkyl, alkaryl or aralkyl, F, Cl, Br, CN, CF₃, OCF₃, OCN, O-alkyl, S-alkyl, N-alkyl, O-alkenyl, S-alkenyl, N-alkenyl, SO-alkyl, alkyl-OSH, alkyl-OH, O-alkyl-OH, O-alkyl-SH, S-alkyl-OH, S-alkyl-SH, alkyl-S-alkyl, alkyl-O-alkyl, ONO₂, NO₂, N₃, NH₂, aminoalkyl, aminoacid, aminoacyl, ONH₂, O-aminoalkyl, O-aminoacid, O-aminoacyl, heterocycloalkyl, heterocycloalkaryl, aminoalkylamino, polyalklylamino, substituted silyl, or group having Formula I or II; R₉ is O, S, CH₂, S═O, CHF, or CF₂, and B is a nucleosidic base such as adenine, guanine, uracil, cytosine, thymine, 2-aminoadenosine, 5-methylcytosine, 2,6-diaminopurine, or any other non-naturally occurring base that can be complementary or non-complementary to target RNA or a non-nucleosidic base such as phenyl, naphthyl, 3-nitropyrrole, 5-nitroindole, nebularine, pyridone, pyridinone, or any other non-naturally occurring universal base that can be complementary or non-complementary to target RNA.

[0098] The chemically-modified nucleotide or non-nucleotide of Formula II can be present in one or both oligonucleotide strands of the siNA duplex, for example in the sense strand, the antisense strand, or both strands. The siNA molecules of the invention can comprise one or more chemically-modified nucleotide or non-nucleotide of Formula II at the 3′-end, the 5′-end, or both of the 3′ and 5′-ends of the sense strand, the antisense strand, or both strands. For example, an exemplary siNA molecule of the invention can comprise about 1 to about 5 or more (e.g., about 1, 2, 3, 4, 5, or more) chemically-modified nucleotides or non-nucleotides of Formula II at the 5′-end of the sense strand, the antisense strand, or both strands. In anther non-limiting example, an exemplary siNA molecule of the invention can comprise about 1 to about 5 or more (e.g., about 1, 2, 3, 4, 5, or more) chemically-modified nucleotides or non-nucleotides of Formula II at the 3′-end of the sense strand, the antisense strand, or both strands.

[0099] In one embodiment, the invention features a chemically-modified short interfering nucleic acid (siNA) molecule capable of mediating RNA interference (RNAi) inside a cell or reconstituted in vitro system, wherein the chemical modification comprises one or more (e.g., about 1, 2, 3, 4, 5, 6, 7, 8, 9, 10, or more) nucleotides or non-nucleotides having Formula III: [chemical structure]
wherein each R₃, R₄, R₅, R₆, R₇, R₈, R₁₀, R₁₁ and R₁₂ is independently H, OH, alkyl, substituted alkyl, alkaryl or aralkyl, F, Cl, Br, CN, CF₃, OCF₃, OCN, O-alkyl, S-alkyl, N-alkyl, O-alkenyl, S-alkenyl, N-alkenyl, SO-alkyl, alkyl-OSH, alkyl-OH, O-alkyl-OH, O-alkyl-SH, S-alkyl-OH, S-alkyl-SH, alkyl-S-alkyl, alkyl-O-alkyl, ONO₂, NO₂, N₃, NH₂, aminoalkyl, aminoacid, aminoacyl, ONH₂, O-aminoalkyl, O-aminoacid, O-aminoacyl, heterocycloalkyl, heterocycloalkaryl, aminoalkylamino, polyalklylamino, substituted silyl, or group having Formula I or II; R₉ is O, S, CH₂, S═O, CHF, or CF₂, and B is a nucleosidic base such as adenine, guanine, uracil, cytosine, thymine, 2-aminoadenosine, 5-methylcytosine, 2,6-diaminopurine, or any other non-naturally occurring base that can be employed to be complementary or non-complementary to target RNA or a non-nucleosidic base such as phenyl, naphthyl, 3-nitropyrrole, 5-nitroindole, nebularine, pyridone, pyridinone, or any other non-naturally occurring universal base that can be complementary or non-complementary to target RNA.

[0100] The chemically-modified nucleotide or non-nucleotide of Formula III can be present in one or both oligonucleotide strands of the siNA duplex, for example, in the sense strand, the antisense strand, or both strands. The siNA molecules of the invention can comprise one or more chemically-modified nucleotide or non-nucleotide of Formula III at the 3′-end, the 5′-end, or both of the 3′ and 5′-ends of the sense strand, the antisense strand, or both strands. For example, an exemplary siNA molecule of the invention can comprise about 1 to about 5 or more (e.g., about 1, 2, 3, 4, 5, or more) chemically-modified nucleotide(s) or non-nucleotide(s) of Formula III at the 5′-end of the sense strand, the antisense strand, or both strands. In anther non-limiting example, an exemplary siNA molecule of the invention can comprise about 1 to about 5 or more (e.g., about 1, 2, 3, 4, 5, or more) chemically-modified nucleotide or non-nucleotide of Formula III at the 3′-end of the sense strand, the antisense strand, or both strands.

[0101] In another embodiment, a siNA molecule of the invention comprises a nucleotide having Formula II or III, wherein the nucleotide having Formula II or III is in an inverted configuration. For example, the nucleotide having Formula II or III is connected to the siNA construct in a 3′-3′, 3′-2′, 2′-3′, or 5′-5′ configuration, such as at the 3′-end, the 5′-end, or both of the 3′ and 5′-ends of one or both siNA strands.

[0102] In one embodiment, the invention features a chemically-modified short interfering nucleic acid (siNA) molecule capable of mediating RNA interference (RNAi) inside a cell or reconstituted in vitro system, wherein the chemical modification comprises a 5′-terminal phosphate group having Formula IV: [chemical structure]
wherein each X and Y is independently O, S, N, alkyl, substituted alkyl, or alkylhalo; wherein each Z and W is independently O, S, N, alkyl, substituted alkyl, O-alkyl, S-alkyl, alkaryl, aralkyl, or alkylhalo or acetyl; and/or wherein W, X, Y and Z are not all O.

[0103] In one embodiment, the invention features a siNA molecule having a 5′-terminal phosphate group having Formula IV on the target-complementary strand, for example, a strand complementary to a target RNA, wherein the siNA molecule comprises an all RNA siNA molecule. In another embodiment, the invention features a siNA molecule having a 5′-terminal phosphate group having Formula IV on the target-complementary strand wherein the siNA molecule also comprises about 1 to about 3 (e.g., about 1, 2, or 3) nucleotide 3′-terminal nucleotide overhangs having about 1 to about 4 (e.g., about 1, 2, 3, or 4) deoxyribonucleotides on the 3′-end of one or both strands. In another embodiment, a 5′-terminal phosphate group having Formula IV is present on the target-complementary strand of a siNA molecule of the invention, for example a siNA molecule having chemical modifications having any of Formulae I-VII.

[0104] In one embodiment, the invention features a chemically-modified short interfering nucleic acid (siNA) molecule capable of mediating RNA interference (RNAi) inside a cell or reconstituted in vitro system, wherein the chemical modification comprises one or more phosphorothioate, phosphonoacetate, and/or thiophosphonoacetate internucleotide linkages. For example, in a non-limiting example, the invention features a chemically-modified short interfering nucleic acid (siNA) having about 1, 2, 3, 4, 5, 6, 7, 8 or more phosphorothioate internucleotide linkages in one siNA strand. In yet another embodiment, the invention features a chemically-modified short interfering nucleic acid (siNA) individually having about 1, 2, 3, 4, 5, 6, 7, 8 or more phosphorothioate internucleotide linkages in both siNA strands. The phosphorothioate internucleotide linkages can be present in one or both oligonucleotide strands of the siNA duplex, for example in the sense strand, the antisense strand, or both strands. The siNA molecules of the invention can comprise one or more phosphorothioate, phosphonoacetate, and/or thiophosphonoacetate internucleotide linkages at the 3′-end, the 5′-end, or both of the 3′- and 5′-ends of the sense strand, the antisense strand, or both strands. For example, an exemplary siNA molecule of the invention can comprise about 1 to about 5 or more (e.g., about 1, 2, 3, 4, 5, or more) consecutive phosphorothioate internucleotide linkages at the 5′-end of the sense strand, the antisense strand, or both strands. In another non-limiting example, an exemplary siNA molecule of the invention can comprise one or more (e.g., about 1, 2, 3, 4, 5, 6, 7, 8, 9, 10, or more) pyrimidine phosphorothioate internucleotide linkages in the sense strand, the antisense strand, or both strands. In yet another non-limiting example, an exemplary siNA molecule of the invention can comprise one or more (e.g., about 1, 2, 3, 4, 5, 6, 7, 8, 9, 10, or more) purine phosphorothioate internucleotide linkages in the sense strand, the antisense strand, or both strands.

[0105] In one embodiment, the invention features a siNA molecule, wherein the sense strand comprises one or more, for example, about 1, 2, 3, 4, 5, 6, 7, 8, 9, 10, or more phosphorothioate internucleotide linkages, and/or one or more (e.g., about 1, 2, 3, 4, 5, 6, 7, 8, 9, 10 or more) 2′-deoxy, 2′-O-methyl, 2′-deoxy-2′-fluoro, and/or about one or more (e.g., about 1, 2, 3, 4, 5, 6, 7, 8, 9, 10 or more) universal base modified nucleotides, and optionally a terminal cap molecule at the 3′-end, the 5′-end, or both of the 3′- and 5′-ends of the sense strand; and wherein the antisense strand comprises about 1 to about 10 or more, specifically about 1, 2, 3, 4, 5, 6, 7, 8, 9, 10, or more phosphorothioate internucleotide linkages, and/or one or more (e.g., about 1, 2, 3, 4, 5, 6, 7, 8, 9, 10 or more) 2′-deoxy, 2′-O-methyl, 2′-deoxy-2′-fluoro, and/or one or more (e.g., about 1, 2, 3, 4, 5, 6, 7, 8, 9, 10 or more) universal base modified nucleotides, and optionally a terminal cap molecule at the 3′-end, the 5′-end, or both of the 3′- and 5′-ends of the antisense strand. In another embodiment, one or more, for example about 1, 2, 3, 4, 5, 6, 7, 8, 9, 10, or more, pyrimidine nucleotides of the sense and/or antisense siNA strand are chemically-modified with 2′-deoxy, 2′-O-methyl and/or 2′-deoxy-2′-fluoro nucleotides, with or without one or more, for example about 1, 2, 3, 4, 5, 6, 7, 8, 9, 10, or more, phosphorothioate internucleotide linkages and/or a terminal cap molecule at the 3′-end, the 5′-end, or both of the 3′- and 5′-ends, being present in the same or different strand.

[0106] In another embodiment, the invention features a siNA molecule, wherein the sense strand comprises about 1 to about 5, specifically about 1, 2, 3, 4, or 5 phosphorothioate internucleotide linkages, and/or one or more (e.g., about 1, 2, 3, 4, 5, or more) 2′-deoxy, 2′-O-methyl, 2′-deoxy-2′-fluoro, and/or one or more (e.g., about 1, 2, 3, 4, 5, or more) universal base modified nucleotides, and optionally a terminal cap molecule at the 3-end, the 5′-end, or both of the 3′- and 5′-ends of the sense strand; and wherein the antisense strand comprises about 1 to about 5 or more, specifically about 1, 2, 3, 4, 5, or more phosphorothioate internucleotide linkages, and/or one or more (e.g. about 1, 2, 3, 4, 5, 6, 7, 8, 9, 10 or more) 2′-deoxy, 2′-O-methyl, 2′-deoxy-2′-fluoro, and/or one or more (e.g., about 1, 2, 3, 4, 5, 6, 7, 8, 9, 10 or more) universal base modified nucleotides, and optionally a terminal cap molecule at the 3′-end, the 5′-end, or both of the 3′- and 5′-ends of the antisense strand. In another embodiment, one or more, for example about 1, 2, 3, 4, 5, 6, 7, 8, 9, 10, or more, pyrimidine nucleotides of the sense and/or antisense siNA strand are chemically-modified with 2′-deoxy, 2′-O-methyl and/or 2′-deoxy-2′-fluoro nucleotides, with or without about 1 to about 5 or more, for example about 1, 2, 3, 4, 5, or more phosphorothioate internucleotide linkages and/or a terminal cap molecule at the 3′-end, the 5′-end, or both of the 3′- and 5′-ends, being present in the same or different strand.

[0107] In one embodiment, the invention features a siNA molecule, wherein the antisense strand comprises one or more, for example, about 1, 2, 3, 4, 5, 6, 7, 8, 9, 10, or more phosphorothioate internucleotide linkages, and/or about one or more (e.g., about 1, 2, 3, 4, 5, 6, 7, 8, 9, 10 or more) 2′-deoxy, 2′-O-methyl, 2′-deoxy-2′-fluoro, and/or one or more (e.g., about 1, 2, 3, 4, 5, 6, 7, 8, 9, 10 or more) universal base modified nucleotides, and optionally a terminal cap molecule at the 3′-end, the 5′-end, or both of the 3′- and 5′-ends of the sense strand; and wherein the antisense strand comprises about 1 to about 10 or more, specifically about 1, 2, 3, 4, 5, 6, 7, 8, 9, 10 or more phosphorothioate internucleotide linkages, and/or one or more (e.g., about 1, 2, 3, 4, 5, 6, 7, 8, 9, 10 or more) 2′-deoxy, 2′-O-methyl, 2′-deoxy-2′-fluoro, and/or one or more (e.g., about 1, 2, 3, 4, 5, 6, 7, 8, 9, 10 or more) universal base modified nucleotides, and optionally a terminal cap molecule at the 3′-end, the 5′-end, or both of the 3′- and 5′-ends of the antisense strand. In another embodiment, one or more, for example about 1, 2, 3, 4, 5, 6, 7, 8, 9, 10 or more pyrimidine nucleotides of the sense and/or antisense siNA strand are chemically-modified with 2′-deoxy, 2′-O-methyl and/or 2′-deoxy-2′-fluoro nucleotides, with or without one or more, for example, about 1, 2, 3, 4, 5, 6, 7, 8, 9, 10 or more phosphorothioate internucleotide linkages and/or a terminal cap molecule at the 3′-end, the 5′-end, or both of the 3′ and 5′-ends, being present in the same or different strand.

[0108] In another embodiment, the invention features a siNA molecule, wherein the antisense strand comprises about 1 to about 5 or more, specifically about 1, 2, 3, 4, 5 or more phosphorothioate internucleotide linkages, and/or one or more (e.g., about 1, 2, 3, 4, 5, 6, 7, 8, 9, 10 or more) 2′-deoxy, 2′-O-methyl, 2′-deoxy-2′-fluoro, and/or one or more (e.g., about 1, 2, 3, 4, 5, 6, 7, 8, 9, 10 or more) universal base modified nucleotides, and optionally a terminal cap molecule at the 3′-end, the 5′-end, or both of the 31 and 5′-ends of the sense strand; and wherein the antisense strand comprises about 1 to about 5 or more, specifically about 1, 2, 3, 4, 5 or more phosphorothioate internucleotide linkages, and/or one or more (e.g., about 1, 2, 3, 4, 5, 6, 7, 8, 9, 10 or more) 2′-deoxy, 2′-O-methyl, 2′-deoxy-2′-fluoro, and/or one or more (e.g., about 1, 2, 3, 4, 5, 6, 7, 8, 9, 10 or more) universal base modified nucleotides, and optionally a terminal cap molecule at the 3′-end, the 5′-end, or both of the 3′- and 5′-ends of the antisense strand. In another embodiment, one or more, for example about 1, 2, 3, 4, 5, 6, 7, 8, 9, 10 or more pyrimidine nucleotides of the sense and/or antisense siNA strand are chemically-modified with 2′-deoxy, 2′-O-methyl and/or 2′-deoxy-2′-fluoro nucleotides, with or without about 1 to about 5, for example about 1, 2, 3, 4, 5 or more phosphorothioate internucleotide linkages and/or a terminal cap molecule at the 3′-end, the 5′-end, or both of the 3′- and 5′-ends, being present in the same or different strand.

[0109] In one embodiment, the invention features a chemically-modified short interfering nucleic acid (siNA) molecule having about 1 to about 5, specifically about 1, 2, 3, 4, 5 or more phosphorothioate internucleotide linkages in each strand of the siNA molecule.

[0110] In another embodiment, the invention features a siNA molecule comprising 2′-5′ internucleotide linkages. The 2′-5′ internucleotide linkage(s) can be at the 3′-end, the 5′-end, or both of the 3′- and 5′-ends of one or both siNA sequence strands. In addition, the 2′-5′ internucleotide linkage(s) can be present at various other positions within one or both siNA sequence strands, for example, about 1, 2, 3, 4, 5, 6, 7, 8, 9, 10, or more including every internucleotide linkage of a pyrimidine nucleotide in one or both strands of the siNA molecule can comprise a 2′-5′ internucleotide linkage, or about 1, 2, 3, 4, 5, 6, 7, 8, 9, 10, or more including every internucleotide linkage of a purine nucleotide in one or both strands of the siNA molecule can comprise a 2′-5′ internucleotide linkage.

[0111] In another embodiment, a chemically-modified siNA molecule of the invention comprises a duplex having two strands, one or both of which can be chemically-modified, wherein each strand is about 18 to about 27 (e.g., about 18, 19, 20, 21, 22, 23, 24, 25, 26, or 27) nucleotides in length, wherein the duplex has about 18 to about 23 (e.g., about 18, 19, 20, 21, 22, or 23) base pairs, and wherein the chemical modification comprises a structure having any of Formulae I-VII. For example, an exemplary chemically-modified siNA molecule of the invention comprises a duplex having two strands, one or both of which can be chemically-modified with a chemical modification having any of Formulae I-VII or any combination thereof, wherein each strand consists of about 21 nucleotides, each having a 2-nucleotide 3′-terminal nucleotide overhang, and wherein the duplex has about 19 base pairs. In another embodiment, a siNA molecule of the invention comprises a single stranded hairpin structure, wherein the siNA is about 36 to about 70 (e.g., about 36, 40, 45, 50, 55, 60, 65, or 70) nucleotides in length having about 18 to about 23 (e.g., about 18, 19, 20, 21, 22, or 23) base pairs, and wherein the siNA can include a chemical modification comprising a structure having any of Formulae I-VII or any combination thereof. For example, an exemplary chemically-modified siNA molecule of the invention comprises a linear oligonucleotide having about 42 to about 50 (e.g., about 42, 43, 44, 45, 46, 47, 48, 49, or 50) nucleotides that is chemically-modified with a chemical modification having any of Formulae I-VII or any combination thereof, wherein the linear oligonucleotide forms a hairpin structure having about 19 base pairs and a 2-nucleotide 3′-terminal nucleotide overhang. In another embodiment, a linear hairpin siNA molecule of the invention contains a stem loop motif, wherein the loop portion of the siNA molecule is biodegradable. For example, a linear hairpin siNA molecule of the invention is designed such that degradation of the loop portion of the siNA molecule in vivo can generate a double-stranded siNA molecule with 3′-terminal overhangs, such as 3′-terminal nucleotide overhangs comprising about 2 nucleotides.

[0112] In another embodiment, a siNA molecule of the invention comprises a hairpin structure, wherein the siNA is about 25 to about 50 (e.g., about 25, 26, 27, 28, 29, 30, 31, 32, 33, 34, 35, 36, 37, 38, 39, 40, 41, 42, 43, 44, 45, 46, 47, 48, 49, or 50) nucleotides in length having about 3 to about 25 (e.g., about 3, 4, 5, 6, 7, 8, 9, 10, 11, 12, 13, 14, 15, 16, 17, 18, 19, 20, 21, 22, 23, 24, or 25) base pairs, and wherein the siNA can include one or more chemical modifications comprising a structure having any of Formulae I-VII or any combination thereof. For example, an exemplary chemically-modified siNA molecule of the invention comprises a linear oligonucleotide having about 25 to about 35 (e.g., about 25, 26, 27, 28, 29, 30, 31, 32, 33, 34, or 35) nucleotides that is chemically-modified with one or more chemical modifications having any of Formulae I-VII or any combination thereof, wherein the linear oligonucleotide forms a hairpin structure having about 3 to about 23 (e.g., about 3, 4, 5, 6, 7, 8, 9, 10, 11, 12, 13, 14, 15, 16, 17, 18, 19, 20, 21, 22, or 23) base pairs and a 5′-terminal phosphate group that can be chemically modified as described herein (for example a 5′-terminal phosphate group having Formula IV). In another embodiment, a linear hairpin siNA molecule of the invention contains a stem loop motif, wherein the loop portion of the siNA molecule is biodegradable. In another embodiment, a linear hairpin siNA molecule of the invention comprises a loop portion comprising a non-nucleotide linker.

[0113] In another embodiment, a siNA molecule of the invention comprises an asymmetric hairpin structure, wherein the siNA is about 25 to about 50 (e.g., about 25, 26, 27, 28, 29, 30, 31, 32, 33, 34, 35, 36, 37, 38, 39, 40, 41, 42, 43, 44, 45, 46, 47, 48, 49, or 50) nucleotides in length having about 3 to about 20 (e.g., about 3, 4, 5, 6, 7, 8, 9, 10, 11, 12, 13, 14, 15, 16, 17, 18, 19, or 20) base pairs, and wherein the siNA can include one or more chemical modifications comprising a structure having any of Formulae I-VII or any combination thereof. For example, an exemplary chemically-modified siNA molecule of the invention comprises a linear oligonucleotide having about 25 to about 35 (e.g., about 25, 26, 27, 28, 29, 30, 31, 32, 33, 34, or 35) nucleotides that is chemically-modified with one or more chemical modifications having any of Formulae I-VII or any combination thereof, wherein the linear oligonucleotide forms an asymmetric hairpin structure having about 3 to about 18 (e.g., about 3, 4, 5, 6, 7, 8, 9, 10, 11, 12, 13, 14, 15, 16, 17, or 18) base pairs and a 5′-terminal phosphate group that can be chemically modified as described herein (for example a 5′-terminal phosphate group having Formula IV). In another embodiment, an asymmetric hairpin siNA molecule of the invention contains a stem loop motif, wherein the loop portion of the siNA molecule is biodegradable. In another embodiment, an asymmetric hairpin siNA molecule of the invention comprises a loop portion comprising a non-nucleotide linker.

[0114] In another embodiment, a siNA molecule of the invention comprises an asymmetric double stranded structure having separate polynucleotide strands comprising sense and antisense regions, wherein the antisense region is about 16 to about 25 (e.g., about 16, 17, 18, 19, 20, 21, 22, 23, 24, or 25) nucleotides in length, wherein the sense region is about 3 to about 18 (e.g., about 3, 4, 5, 6, 7, 8, 9, 10, 11, 12, 13, 14, 15, 16, 17, or 18) nucleotides in length, wherein the sense region the antisense region have at least 3 complementary nucleotides, and wherein the siNA can include one or more chemical modifications comprising a structure having any of Formulae I-VII or any combination thereof. For example, an exemplary chemically-modified siNA molecule of the invention comprises an asymmetric double stranded structure having separate polynucleotide strands comprising sense and antisense regions, wherein the antisense region is about 18 to about 22 (e.g., about 18, 19, 20, 21, or 22) nucleotides in length and wherein the sense region is about 3 to about 15 (e.g., about 3, 4, 5, 6, 7, 8, 9, 10, 11, 12, 13, 14, or 15) nucleotides in length, wherein the sense region the antisense region have at least 3 complementary nucleotides, and wherein the siNA can include one or more chemical modifications comprising a structure having any of Formulae I-VII or any combination thereof. In another embodiment, the asymmetric double stranded siNA molecule can also have a 5′-terminal phosphate group that can be chemically modified as described herein (for example a 5′-terminal phosphate group having Formula IV).

[0115] In another embodiment, a siNA molecule of the invention comprises a circular nucleic acid molecule, wherein the siNA is about 38 to about 70 (e.g., about 38, 40, 45, 50, 55, 60, 65, or 70) nucleotides in length having about 18 to about 23 (e.g., about 17, 18, 19, 20, 21, 22, 23 or 24) base pairs, and wherein the siNA can include a chemical modification, which comprises a structure having any of Formulae I-VII or any combination thereof. For example, an exemplary chemically-modified siNA molecule of the invention comprises a circular oligonucleotide having about 42 to about 50 (e.g., about 42, 43, 44, 45, 46, 47, 48, 49, or 50) nucleotides that is chemically-modified with a chemical modification having any of Formulae I-VII or any combination thereof, wherein the circular oligonucleotide forms a dumbbell shaped structure having about 19 base pairs and 2 loops.

[0116] In another embodiment, a circular siNA molecule of the invention contains two loop motifs, wherein one or both loop portions of the siNA molecule is biodegradable. For example, a circular siNA molecule of the invention is designed such that degradation of the loop portions of the siNA molecule in vivo can generate a double-stranded siNA molecule with 3′-terminal overhangs, such as 3′-terminal nucleotide overhangs comprising about 2 nucleotides.

[0117] In one embodiment, a siNA molecule of the invention comprises at least one (e.g., about 1, 2, 3, 4, 5, 6, 7, 8, 9, 10, or more) abasic moiety, for example a compound having Formula V: [chemical structure]
wherein each R₃, R₄, R₅, R₆, R₇, R₈, R₁₀, R₁₁, R₁₂, and R₁₃ is independently H, OH, alkyl, substituted alkyl, alkaryl or aralkyl, F, Cl, Br, CN, CF₃, OCF₃, OCN, O-alkyl, S-alkyl, N-alkyl, O-alkenyl, S-alkenyl, N-alkenyl, SO-alkyl, alkyl-OSH, alkyl-OH, O-alkyl-OH, O-alkyl-SH, S-alkyl-OH, S-alkyl-SH, alkyl-S-alkyl, alkyl-O-alkyl, ONO₂, NO₂, N₃, NH₂, aminoalkyl, aminoacid, aminoacyl, ONH₂, O-aminoalkyl, O-aminoacid, O-aminoacyl, heterocycloalkyl, heterocycloalkaryl, aminoalkylamino, polyalklylamino, substituted silyl, or group having Formula I or II; R₉ is O, S, CH₂, S═O, CHF, or CF₂.

[0118] In one embodiment, a siNA molecule of the invention comprises at least one (e.g., about 1, 2, 3, 4, 5, 6, 7, 8, 9, 10, or more) inverted abasic moiety, for example a compound having Formula VI: [chemical structure]
wherein each R₃, R₄, R₅, R₆, R₇, R₈, R₁₀, R₁₁, R₁₂, and R₁₃ is independently H, OH, alkyl, substituted alkyl, alkaryl or aralkyl, F, Cl, Br, CN, CF₃, OCF₃, OCN, O-alkyl, S-alkyl, N-alkyl, O-alkenyl, S-alkenyl, N-alkenyl, SO-alkyl, alkyl-OSH, alkyl-OH, O-alkyl-OH, O-alkyl-SH, S-alkyl-OH, S-alkyl-SH, alkyl-S-alkyl, alkyl-O-alkyl, ONO₂, NO₂, N₃, NH₂, aminoalkyl, aminoacid, aminoacyl, ONH₂, O-aminoalkyl, O-aminoacid, O-aminoacyl, heterocycloalkyl, heterocycloalkaryl, aminoalkylamino, polyalklylamino, substituted silyl, or group having Formula I or II; R₉ is O, S, CH₂, S═O, CHF, or CF₂, and either R₃, R₅, R₈ or R₁₃ serve as points of attachment to the siNA molecule of the invention.

[0119] In another embodiment, a siNA molecule of the invention comprises at least one (e.g., about 1, 2, 3, 4, 5, 6, 7, 8, 9, 10, or more) substituted polyalkyl moieties, for example a compound having Formula VII:

[chemical structure]

[0120] wherein each n is independently an integer from 1 to 12, each R₁, R₂ and R₃ is independently H, OH, alkyl, substituted alkyl, alkaryl or aralkyl, F, Cl, Br, CN, CF₃, OCF₃, OCN, O-alkyl, S-alkyl, N-alkyl, O-alkenyl, S-alkenyl, N-alkenyl, SO-alkyl, alkyl-OSH, alkyl-OH, O-alkyl-OH, O-alkyl-SH, S-alkyl-OH, S-alkyl-SH, alkyl-S-alkyl, alkyl-O-alkyl, ONO₂, NO₂, N₃, NH₂, aminoalkyl, aminoacid, aminoacyl, ONH₂, O-aminoalkyl, O-aminoacid, O-aminoacyl, heterocycloalkyl, heterocycloalkaryl, aminoalkylamino, polyalklylamino, substituted silyl, or a group having Formula I, and R₁, R₂ or R₃ serves as points of attachment to the siNA molecule of the invention.

[0121] In another embodiment, the invention features a compound having Formula VII, wherein R₁ and R₂ are hydroxyl (OH) groups, n=1, and R₃ comprises O and is the point of attachment to the 3′-end, the 5′-end, or both of the 3′ and 5′-ends of one or both strands of a double-stranded siNA molecule of the invention or to a single-stranded siNA molecule of the invention. This modification is referred to herein as “glyceryl” (for example modification 6 in FIG. 22).

[0122] In another embodiment, a moiety having any of Formula V, VI or VII of the invention is at the 3′-end, the 5′-end, or both of the 3′ and 5′-ends of a siNA molecule of the invention. For example, a moiety having Formula V, VI or VII can be present at the 3′-end, the 5′-end, or both of the 3′ and 5′-ends of the antisense strand, the sense strand, or both antisense and sense strands of the siNA molecule. In addition, a moiety having Formula VII can be present at the 3′-end or the 5′-end of a hairpin siNA molecule as described herein.

[0123] In another embodiment, a siNA molecule of the invention comprises an abasic residue having Formula V or VI, wherein the abasic residue having Formula V or VI is connected to the siNA construct in a 3-3′, 3-2′, 2-3′, or 5-5′ configuration, such as at the 3′-end, the 5′-end, or both of the 3′ and 5′-ends of one or both siNA strands.

[0124] In one embodiment, a siNA molecule of the invention comprises one or more (e.g., about 1, 2, 3, 4, 5, 6, 7, 8, 9, 10, or more) locked nucleic acid (LNA) nucleotides, for example at the 5′-end, the 3′-end, both of the 5′ and 3′-ends, or any combination thereof, of the siNA molecule.

[0125] In another embodiment, a siNA molecule of the invention comprises one or more (e.g., about 1, 2, 3, 4, 5, 6, 7, 8, 9, 10, or more) acyclic nucleotides, for example at the 5′-end, the 3′-end, both of the 5′ and 3′-ends, or any combination thereof, of the siNA molecule.

[0126] In one embodiment, the sense strand of a double stranded siNA molecule of the invention comprises a terminal cap moiety, (see for example FIG. 22) such as an inverted deoxyabasic moiety or inverted nucleotide, at the 3′-end, 5′-end, or both 3′ and 5′-ends of the sense strand.

[0127] In one embodiment, the invention features a chemically-modified short interfering nucleic acid (siNA) molecule of the invention, wherein the chemically-modified siNA comprises a sense region, where any (e.g., one or more or all) pyrimidine nucleotides present in the sense region are 2′-deoxy-2′-fluoro pyrimidine nucleotides (e.g., wherein all pyrimidine nucleotides are 2′-deoxy-2′-fluoro pyrimidine nucleotides or alternately a plurality of pyrimidine nucleotides are 2′-deoxy-2′-fluoro pyrimidine nucleotides), and where any (e.g., one or more or all) purine nucleotides present in the sense region are 2′-deoxy purine nucleotides (e.g., wherein all purine nucleotides are 2′-deoxy purine nucleotides or alternately a plurality of purine nucleotides are 2′-deoxy purine nucleotides).

[0128] In one embodiment, the invention features a chemically-modified short interfering nucleic acid (siNA) molecule of the invention, wherein the chemically-modified siNA comprises a sense region, where any (e.g., one or more or all) pyrimidine nucleotides present in the sense region are 2′-deoxy-2′-fluoro pyrimidine nucleotides (e.g., wherein all pyrimidine nucleotides are 2′-deoxy-2′-fluoro pyrimidine nucleotides or alternately a plurality of pyrimidine nucleotides are 2′-deoxy-2′-fluoro pyrimidine nucleotides), and where any (e.g., one or more or all) purine nucleotides present in the sense region are 2′-deoxy purine nucleotides (e.g., wherein all purine nucleotides are 2′-deoxy purine nucleotides or alternately a plurality of purine nucleotides are 2′-deoxy purine nucleotides), wherein any nucleotides comprising a 3′-terminal nucleotide overhang that are present in said sense region are 2′-deoxy nucleotides.

[0129] In one embodiment, the invention features a chemically-modified short interfering nucleic acid (siNA) molecule of the invention, wherein the chemically-modified siNA comprises a sense region, where any (e.g., one or more or all) pyrimidine nucleotides present in the sense region are 2′-deoxy-2′-fluoro pyrimidine nucleotides (e.g., wherein all pyrimidine nucleotides are 2′-deoxy-2′-fluoro pyrimidine nucleotides or alternately a plurality of pyrimidine nucleotides are 2′-deoxy-2′-fluoro pyrimidine nucleotides), and where any (e.g., one or more or all) purine nucleotides present in the sense region are 2′-O-methyl purine nucleotides (e.g., wherein all purine nucleotides are 2′-O-methyl purine nucleotides or alternately a plurality of purine nucleotides are 2′-O-methyl purine nucleotides).

[0130] In one embodiment, the invention features a chemically-modified short interfering nucleic acid (siNA) molecule of the invention, wherein the chemically-modified siNA comprises a sense region, where any (e.g., one or more or all) pyrimidine nucleotides present in the sense region are 2′-deoxy-2′-fluoro pyrimidine nucleotides (e.g., wherein all pyrimidine nucleotides are 2′-deoxy-2′-fluoro pyrimidine nucleotides or alternately a plurality of pyrimidine nucleotides are 2′-deoxy-2′-fluoro pyrimidine nucleotides), and where any (e.g., one or more or all) purine nucleotides present in the sense region are 2′-O-methyl purine nucleotides (e.g., wherein all purine nucleotides are 2′-O-methyl purine nucleotides or alternately a plurality of purine nucleotides are 2′-O-methyl purine nucleotides), wherein any nucleotides comprising a 3′-terminal nucleotide overhang that are present in said sense region are 2′-deoxy nucleotides.

[0131] In one embodiment, the invention features a chemically-modified short interfering nucleic acid (siNA) molecule of the invention, wherein the chemically-modified siNA comprises an antisense region, where any (e.g., one or more or all) pyrimidine nucleotides present in the antisense region are 2′-deoxy-2′-fluoro pyrimidine nucleotides (e.g., wherein all pyrimidine nucleotides are 2′-deoxy-2′-fluoro pyrimidine nucleotides or alternately a plurality of pyrimidine nucleotides are 2′-deoxy-2′-fluoro pyrimidine nucleotides), and wherein any (e.g., one or more or all) purine nucleotides present in the antisense region are 2′-O-methyl purine nucleotides (e.g., wherein all purine nucleotides are 2′-O-methyl purine nucleotides or alternately a plurality of purine nucleotides are 2′-O-methyl purine nucleotides).

[0132] In one embodiment, the invention features a chemically-modified short interfering nucleic acid (siNA) molecule of the invention, wherein the chemically-modified siNA comprises an antisense region, where any (e.g., one or more or all) pyrimidine nucleotides present in the antisense region are 2′-deoxy-2′-fluoro pyrimidine nucleotides (e.g., wherein all pyrimidine nucleotides are 2′-deoxy-2′-fluoro pyrimidine nucleotides or alternately a plurality of pyrimidine nucleotides are 2′-deoxy-2′-fluoro pyrimidine nucleotides), and wherein any (e.g., one or more or all) purine nucleotides present in the antisense region are 2′-O-methyl purine nucleotides (e.g., wherein all purine nucleotides are 2′-O-methyl purine nucleotides or alternately a plurality of purine nucleotides are 2′-O-methyl purine nucleotides), wherein any nucleotides comprising a 3′-terminal nucleotide overhang that are present in said antisense region are 2′-deoxy nucleotides.

[0133] In one embodiment, the invention features a chemically-modified short interfering nucleic acid (siNA) molecule of the invention, wherein the chemically-modified siNA comprises an antisense region, where any (e.g., one or more or all) pyrimidine nucleotides present in the antisense region are 2′-deoxy-2′-fluoro pyrimidine nucleotides (e.g., wherein all pyrimidine nucleotides are 2′-deoxy-2′-fluoro pyrimidine nucleotides or alternately a plurality of pyrimidine nucleotides are 2′-deoxy-2′-fluoro pyrimidine nucleotides), and where any (e.g., one or more or all) purine nucleotides present in the antisense region are 2′-deoxy purine nucleotides (e.g., wherein all purine nucleotides are 2′-deoxy purine nucleotides or alternately a plurality of purine nucleotides are 2′-deoxy purine nucleotides).

[0134] In one embodiment, the invention features a chemically-modified short interfering nucleic acid (siNA) molecule of the invention capable of mediating RNA interference (RNAi) inside a cell or reconstituted in vitro system comprising a sense region and an antisense region. In one embodiment, the sense region comprises one or more 2′-deoxy-2′-fluoro pyrimidine nucleotides (e.g., wherein all pyrimidine nucleotides are 2′-deoxy-2′-fluoro pyrimidine nucleotides or alternately a plurality of pyrimidine nucleotides are 2′-deoxy-2′-fluoro pyrimidine nucleotides), and one or more 2′-deoxy purine nucleotides (e.g., wherein all purine nucleotides are 2′-deoxy purine nucleotides or alternately a plurality of purine nucleotides are 2′-deoxy purine nucleotides). The sense region can comprise inverted deoxy abasic modifications that are optionally present at the 3′-end, the 5′-end, or both of the 3′ and 5′-ends of the sense region. The sense region can optionally further comprise a 3′-terminal overhang having about 1 to about 4 (e.g., about 1, 2, 3, or 4) 2′-deoxyribonucleotides. The antisense region comprises one or more 2′-deoxy-2′-fluoro pyrimidine nucleotides (e.g., wherein all pyrimidine nucleotides are 2′-deoxy-2′-fluoro pyrimidine nucleotides or alternately a plurality of pyrimidine nucleotides are 2′-deoxy-2′-fluoro pyrimidine nucleotides), and one or more 2′-O-methyl purine nucleotides (e.g., wherein all purine nucleotides are 2′-O-methyl purine nucleotides or alternately a plurality of purine nucleotides are 2′-O-methyl purine nucleotides). The antisense region can comprise a terminal cap modification, such as any modification described herein or shown in FIG. 22, that is optionally present at the 3′-end, the 5′-end, or both of the 3′ and 5′-ends of the antisense sequence. The antisense region optionally further comprises a 3′-terminal nucleotide overhang having about 1 to about 4 (e.g., about 1, 2, 3, or 4) 2′-deoxynucleotides, wherein the overhang nucleotides can further comprise one or more (e.g., 1, 2, 3, or 4) phosphorothioate internucleotide linkages. Non-limiting examples of these chemically-modified siNAs are shown in FIGS. 18 and 19 and Table IV herein.

[0135] In another embodiment of the chemically-modified short interfering nucleic acid comprising a sense region and an antisense region, the sense region comprises one or more 2′-deoxy-2′-fluoro pyrimidine nucleotides (e.g., wherein all pyrimidine nucleotides are 2′-deoxy-2′-fluoro pyrimidine nucleotides or alternately a plurality of pyrimidine nucleotides are 2′-deoxy-2′-fluoro pyrimidine nucleotides), and one or more purine ribonucleotides (e.g., wherein all purine nucleotides are purine ribonucleotides or alternately a plurality of purine nucleotides are purine ribonucleotides). The sense region can also comprise inverted deoxy abasic modifications that are optionally present at the 3′-end, the 5′-end, or both of the 3′ and 5′-ends of the sense region. The sense region optionally further comprises a 3′-terminal overhang having about 1 to about 4 (e.g., about 1, 2, 3, or 4) 2′-deoxyribonucleotides. The antisense region comprises one or more 2′-deoxy-2′-fluoro pyrimidine nucleotides (e.g., wherein all pyrimidine nucleotides are 2′-deoxy-2′-fluoro pyrimidine nucleotides or alternately a plurality of pyrimidine nucleotides are 2′-deoxy-2′-fluoro pyrimidine nucleotides), and one or more 2′-O-methyl purine nucleotides (e.g., wherein all purine nucleotides are 2′-O-methyl purine nucleotides or alternately a plurality of purine nucleotides are 2′-O-methyl purine nucleotides). The antisense region can also comprise a terminal cap modification, such as any modification described herein or shown in FIG. 22, that is optionally present at the 3′-end, the 5′-end, or both of the 3′ and 5′-ends of the antisense sequence. The antisense region optionally further comprises a 3′-terminal nucleotide overhang having about 1 to about 4 (e.g., about 1, 2, 3, or 4) 2′-deoxynucleotides, wherein the overhang nucleotides can further comprise one or more (e.g., 1, 2, 3, or 4) phosphorothioate internucleotide linkages. Non-limiting examples of these chemically-modified siNAs are shown in FIGS. 18 and 19 and Table IV herein.

[0136] In another embodiment of the chemically-modified short interfering nucleic acid comprising a sense region and an antisense region, the sense region comprises one or more 2′-deoxy-2′-fluoro pyrimidine nucleotides (e.g., wherein all pyrimidine nucleotides are 2′-deoxy-2′-fluoro pyrimidine nucleotides or alternately a plurality of pyrimidine nucleotides are 2′-deoxy-2′-fluoro pyrimidine nucleotides), and one or more purine nucleotides selected from the group consisting of 2′-deoxy nucleotides, locked nucleic acid (LNA) nucleotides, 2′-methoxyethyl nucleotides, 4′-thionucleotides, and 2′-O-methyl nucleotides (e.g., wherein all purine nucleotides are selected from the group consisting of 2′-deoxy nucleotides, locked nucleic acid (LNA) nucleotides, 2′-methoxyethyl nucleotides, 4′-thionucleotides, and 2′-O-methyl nucleotides or alternately a plurality of purine nucleotides are selected from the group consisting of 2′-deoxy nucleotides, locked nucleic acid (LNA) nucleotides, 2′-methoxyethyl nucleotides, 4′-thionucleotides, and 2′-O-methyl nucleotides). The sense region can comprise inverted deoxy abasic modifications that are optionally present at the 3′-end, the 5′-end, or both of the 3′ and 5′-ends of the sense region. The sense region can optionally further comprise a 3′-terminal overhang having about 1 to about 4 (e.g., about 1, 2, 3, or 4) 2′-deoxyribonucleotides. The antisense region comprises one or more 2′-deoxy-2′-fluoro pyrimidine nucleotides (e.g., wherein all pyrimidine nucleotides are 2′-deoxy-2′-fluoro pyrimidine nucleotides or alternately a plurality of pyrimidine nucleotides are 2′-deoxy-2′-fluoro pyrimidine nucleotides), and one or more purine nucleotides selected from the group consisting of 2′-deoxy nucleotides, locked nucleic acid (LNA) nucleotides, 2′-methoxyethyl nucleotides, 4′-thionucleotides, and 2′-O-methyl nucleotides (e.g., wherein all purine nucleotides are selected from the group consisting of 2′-deoxy nucleotides, locked nucleic acid (LNA) nucleotides, 2′-methoxyethyl nucleotides, 4′-thionucleotides, and 2′-O-methyl nucleotides or alternately a plurality of purine nucleotides are selected from the group consisting of 2′-deoxy nucleotides, locked nucleic acid (LNA) nucleotides, 2′-methoxyethyl nucleotides, 4′-thionucleotides, and 2′-O-methyl nucleotides). The antisense can also comprise a terminal cap modification, such as any modification described herein or shown in FIG. 22, that is optionally present at the 3′-end, the 5′-end, or both of the 3′ and 5′-ends of the antisense sequence. The antisense region optionally further comprises a 3′-terminal nucleotide overhang having about 1 to about 4 (e.g., about 1, 2, 3, or 4) 2′-deoxynucleotides, wherein the overhang nucleotides can further comprise one or more (e.g., 1, 2, 3, or 4) phosphorothioate internucleotide linkages.

[0137] In another embodiment, any modified nucleotides present in the siNA molecules of the invention, preferably in the antisense strand of the siNA molecules of the invention, but also optionally in the sense and/or both antisense and sense strands, comprise modified nucleotides having properties or characteristics similar to naturally occurring ribonucleotides. For example, the invention features siNA molecules including modified nucleotides having a Northern conformation (e.g., Northern pseudorotation cycle, see for example Saenger, Principles of Nucleic Acid Structure, Springer-Verlag ed., 1984). As such, chemically modified nucleotides present in the siNA molecules of the invention, preferably in the antisense strand of the siNA molecules of the invention, but also optionally in the sense and/or both antisense and sense strands, are resistant to nuclease degradation while at the same time maintaining the capacity to mediate RNAi. Non-limiting examples of nucleotides having a northern configuration include locked nucleic acid (LNA) nucleotides (e.g., 2′-O,4′-C-methylene-(D-ribofuranosyl) nucleotides); 2′-methoxyethoxy (MOE) nucleotides; 2′-methyl-thio-ethyl, 2′-deoxy-2′-fluoro nucleotides, 2′-deoxy-2′-chloro nucleotides, 2′-azido nucleotides, and 2′-O-methyl nucleotides.

[0138] In one embodiment, the invention features a chemically-modified short interfering nucleic acid molecule (siNA) capable of mediating RNA interference (RNAi) inside a cell or reconstituted in vitro system, wherein the chemical modification comprises a conjugate attached to the chemically-modified siNA molecule. The conjugate can be attached to the chemically-modified siNA molecule via a covalent attachment. In one embodiment, the conjugate is attached to the chemically-modified siNA molecule via a biodegradable linker. In one embodiment, the conjugate molecule is attached at the 3′-end of either the sense strand, the antisense strand, or both strands of the chemically-modified siNA molecule. In another embodiment, the conjugate molecule is attached at the 5′-end of either the sense strand, the antisense strand, or both strands of the chemically-modified siNA molecule. In yet another embodiment, the conjugate molecule is attached both the 3′-end and 5′-end of either the sense strand, the antisense strand, or both strands of the chemically-modified siNA molecule, or any combination thereof. In one embodiment, the conjugate molecule of the invention comprises a molecule that facilitates delivery of a chemically-modified siNA molecule into a biological system, such as a cell. In another embodiment, the conjugate molecule attached to the chemically-modified siNA molecule is a poly ethylene glycol, human serum albumin, or a ligand for a cellular receptor that can mediate cellular uptake. Examples of specific conjugate molecules contemplated by the instant invention that can be attached to chemically-modified siNA molecules are described in Vargeese et al., U.S. Ser. No. 10/201,394, incorporated by reference herein. The type of conjugates used and the extent of conjugation of siNA molecules of the invention can be evaluated for improved pharmacokinetic profiles, bioavailability, and/or stability of siNA constructs while at the same time maintaining the ability of the siNA to mediate RNAi activity. As such, one skilled in the art can screen siNA constructs that are modified with various conjugates to determine whether the siNA conjugate complex possesses improved properties while maintaining the ability to mediate RNAi, for example in animal models as are generally known in the art.

[0139] In one embodiment, the invention features a chemically-modified short interfering nucleic acid (siNA) molecule of the invention capable of mediating RNA interference (RNAi) inside a cell or reconstituted in vitro system, wherein the chemically-modified siNA comprises a sense region, where one or more pyrimidine nucleotides present in the sense region are 2′-deoxy-2′-fluoro pyrimidine nucleotides (e.g. wherein all pyrimidine nucleotides are 2′-deoxy-2′-fluoro pyrimidine nucleotides or alternately a plurality of pyrimidine nucleotides are 2′-deoxy-2′-fluoro pyrimidine nucleotides), and where one or more purine nucleotides present in the sense region are 2′-deoxy purine nucleotides (e.g., wherein all purine nucleotides are 2′-deoxy purine nucleotides or alternately a plurality of purine nucleotides are 2′-deoxy purine nucleotides), and inverted deoxy abasic modifications that are optionally present at the 3′-end, the 5′-end, or both of the 3′ and 5′-ends of the sense region, the sense region optionally further comprising a 3′-terminal overhang having about 1 to about 4 (e.g., about 1, 2, 3, or 4) 2′-deoxyribonucleotides; and wherein the chemically-modified short interfering nucleic acid molecule comprises an antisense region, where one or more pyrimidine nucleotides present in the antisense region are 2′-deoxy-2′-fluoro pyrimidine nucleotides (e.g., wherein all pyrimidine nucleotides are 2′-deoxy-2′-fluoro pyrimidine nucleotides or alternately a plurality of pyrimidine nucleotides are 2′-deoxy-2′-fluoro pyrimidine nucleotides), and wherein one or more purine nucleotides present in the antisense region are 2′-O-methyl purine nucleotides (e.g., wherein all purine nucleotides are 2′-O-methyl purine nucleotides or alternately a plurality of purine nucleotides are 2′-O-methyl purine nucleotides), and a terminal cap modification, such as any modification described herein or shown in FIG. 22, that is optionally present at the 3′-end, the 5′-end, or both of the 3′ and 5′-ends of the antisense sequence, the antisense region optionally further comprising a 3′-terminal nucleotide overhang having about 1 to about 4 (e.g., about 1, 2, 3, or 4) 2′-deoxynucleotides, wherein the overhang nucleotides can further comprise one or more (e.g., 1, 2, 3, or 4) phosphorothioate internucleotide linkages. Non-limiting examples of these chemically-modified siNAs are shown in FIGS. 18 and 19 and Table IV herein.

[0140] In one embodiment, the invention features a chemically-modified short interfering nucleic acid (siNA) molecule of the invention capable of mediating RNA interference (RNAi) inside a cell or reconstituted in vitro system, wherein the chemically-modified siNA comprises a sense region, where one or more pyrimidine nucleotides present in the sense region are 2′-deoxy-2′-fluoro pyrimidine nucleotides (e.g., wherein all pyrimidine nucleotides are 2′-deoxy-2′-fluoro pyrimidine nucleotides or alternately a plurality of pyrimidine nucleotides are 2′-deoxy-2′-fluoro pyrimidine nucleotides), and where one or more purine nucleotides present in the sense region are 2′-O-methyl purine nucleotides (e.g., wherein all purine nucleotides are 2′-O-methyl purine nucleotides or alternately a plurality of purine nucleotides are 2′-O-methyl purine nucleotides), and inverted deoxy abasic modifications that are optionally present at the 3′-end, the 5′-end, or both of the 3′ and 5′-ends of the sense region, the sense region optionally further comprising a 3′-terminal overhang having about 1 to about 4 (e.g., about 1, 2, 3, or 4) 2′-deoxyribonucleotides; and wherein the chemically-modified short interfering nucleic acid molecule comprises an antisense region, where one or more pyrimidine nucleotides present in the antisense region are 2′-deoxy-2′-fluoro pyrimidine nucleotides (e.g., wherein all pyrimidine nucleotides are 2′-deoxy-2′-fluoro pyrimidine nucleotides or alternately a plurality of pyrimidine nucleotides are 2′-deoxy-2′-fluoro pyrimidine nucleotides), and wherein one or more purine nucleotides present in the antisense region are 2′-O-methyl purine nucleotides (e.g., wherein all purine nucleotides are 2′-O-methyl purine nucleotides or alternately a plurality of purine nucleotides are 2′-O-methyl purine nucleotides), and a terminal cap modification, such as any modification described herein or shown in FIG. 22, that is optionally present at the 3′-end, the 5′-end, or both of the 3′ and 5′-ends of the antisense sequence, the antisense region optionally further comprising a 3′-terminal nucleotide overhang having about 1 to about 4 (e.g., about 1, 2, 3, or 4) 2′-deoxynucleotides, wherein the overhang nucleotides can further comprise one or more (e.g., 1, 2, 3, or 4) phosphorothioate internucleotide linkages. Non-limiting examples of these chemically-modified siNAs are shown in FIGS. 18 and 19 and Table IV herein.

[0141] In one embodiment, the invention features a chemically-modified short interfering nucleic acid (siNA) molecule of the invention capable of mediating RNA interference (RNAi) inside a cell or reconstituted in vitro system, wherein the siNA comprises a sense region, where one or more pyrimidine nucleotides present in the sense region are 2′-deoxy-2′-fluoro pyrimidine nucleotides (e.g., wherein all pyrimidine nucleotides are 2′-deoxy-2′-fluoro pyrimidine nucleotides or alternately a plurality of pyrimidine nucleotides are 2′-deoxy-2′-fluoro pyrimidine nucleotides), and where one or more purine nucleotides present in the sense region are purine ribonucleotides (e.g., wherein all purine nucleotides are purine ribonucleotides or alternately a plurality of purine nucleotides are purine ribonucleotides), and inverted deoxy abasic modifications that are optionally present at the 3′-end, the 5′-end, or both of the 3′ and 5′-ends of the sense region, the sense region optionally further comprising a 3′-terminal overhang having about 1 to about 4 (e.g., about 1, 2, 3, or 4) 2′-deoxyribonucleotides; and wherein the siNA comprises an antisense region, where one or more pyrimidine nucleotides present in the antisense region are 2′-deoxy-2′-fluoro pyrimidine nucleotides (e.g., wherein all pyrimidine nucleotides are 2′-deoxy-2′-fluoro pyrimidine nucleotides or alternately a plurality of pyrimidine nucleotides are 2′-deoxy-2′-fluoro pyrimidine nucleotides), and wherein any purine nucleotides present in the antisense region are 2′-O-methyl purine nucleotides (e.g., wherein all purine nucleotides are 2′-O-methyl purine nucleotides or alternately a plurality of purine nucleotides are 2′-O-methyl purine nucleotides), and a terminal cap modification, such as any modification described herein or shown in FIG. 22, that is optionally present at the 3′-end, the 5′-end, or both of the 3′ and 5′-ends of the antisense sequence, the antisense region optionally further comprising a 3′-terminal nucleotide overhang having about 1 to about 4 (e.g., about 1, 2, 3, or 4) 2′-deoxynucleotides, wherein the overhang nucleotides can further comprise one or more (e.g., 1, 2, 3, or 4) phosphorothioate internucleotide linkages. Non-limiting examples of these chemically-modified siNAs are shown in FIGS. 18 and 19 and Table IV herein.

[0142] In one embodiment, the invention features a chemically-modified short interfering nucleic acid (siNA) molecule of the invention capable of mediating RNA interference (RNAi) inside a cell or reconstituted in vitro system, wherein the chemically-modified siNA comprises a sense region, where one or more pyrimidine nucleotides present in the sense region are 2′-deoxy-2′-fluoro pyrimidine nucleotides (e.g., wherein all pyrimidine nucleotides are 2′-deoxy-2′-fluoro pyrimidine nucleotides or alternately a plurality of pyrimidine nucleotides are 2′-deoxy-2′-fluoro pyrimidine nucleotides), and for example where one or more purine nucleotides present in the sense region are selected from the group consisting of 2′-deoxy nucleotides, locked nucleic acid (LNA) nucleotides, 2′-methoxyethyl nucleotides, 4′-thionucleotides, and 2′-O-methyl nucleotides (e.g., wherein all purine nucleotides are selected from the group consisting of 2′-deoxy nucleotides, locked nucleic acid (LNA) nucleotides, 2′-methoxyethyl nucleotides, 4′-thionucleotides, and 2′-O-methyl nucleotides or alternately a plurality of purine nucleotides are selected from the group consisting of 2′-deoxy nucleotides, locked nucleic acid (LNA) nucleotides, 2′-methoxyethyl nucleotides, 4′-thionucleotides, and 2′-O-methyl nucleotides), and wherein inverted deoxy abasic modifications are optionally present at the 3′-end, the 5′-end, or both of the 3′ and 5′-ends of the sense region, the sense region optionally further comprising a 3′-terminal overhang having about 1 to about 4 (e.g., about 1, 2, 3, or 4) 2′-deoxyribonucleotides; and wherein the chemically-modified short interfering nucleic acid molecule comprises an antisense region, where one or more pyrimidine nucleotides present in the antisense region are 2′-deoxy-2′-fluoro pyrimidine nucleotides (e.g., wherein all pyrimidine nucleotides are 2′-deoxy-2′-fluoro pyrimidine nucleotides or alternately a plurality of pyrimidine nucleotides are 2′-deoxy-2′-fluoro pyrimidine nucleotides), and wherein one or more purine nucleotides present in the antisense region are selected from the group consisting of 2′-deoxy nucleotides, locked nucleic acid (LNA) nucleotides, 2′-methoxyethyl nucleotides, 4′-thionucleotides, and 2′-O-methyl nucleotides (e.g., wherein all purine nucleotides are selected from the group consisting of 2′-deoxy nucleotides, locked nucleic acid (LNA) nucleotides, 2′-methoxyethyl nucleotides, 4′-thionucleotides, and 2′-O-methyl nucleotides or alternately a plurality of purine nucleotides are selected from the group consisting of 2′-deoxy nucleotides, locked nucleic acid (LNA) nucleotides, 2′-methoxyethyl nucleotides, 4′-thionucleotides, and 2′-O-methyl nucleotides), and a terminal cap modification, such as any modification described herein or shown in FIG. 22, that is optionally present at the 3′-end, the 5′-end, or both of the 3′ and 5′-ends of the antisense sequence, the antisense region optionally further comprising a 3′-terminal nucleotide overhang having about 1 to about 4 (e.g., about 1, 2, 3, or 4) 2′-deoxynucleotides, wherein the overhang nucleotides can further comprise one or more (e.g., 1, 2, 3, or 4) phosphorothioate internucleotide linkages.

[0143] In one embodiment, the invention features a short interfering nucleic acid (siNA) molecule of the invention, wherein the siNA further comprises a nucleotide, non-nucleotide, or mixed nucleotide/non-nucleotide linker that joins the sense region of the siNA to the antisense region of the siNA. In one embodiment, a nucleotide linker of the invention can be a linker of ≧2 nucleotides in length, for example 3, 4, 5, 6, 7, 8, 9, or 10 nucleotides in length. In another embodiment, the nucleotide linker can be a nucleic acid aptamer. By “aptamer” or “nucleic acid aptamer” as used herein is meant a nucleic acid molecule that binds specifically to a target molecule wherein the nucleic acid molecule has sequence that comprises a sequence recognized by the target molecule in its natural setting. Alternately, an aptamer can be a nucleic acid molecule that binds to a target molecule where the target molecule does not naturally bind to a nucleic acid. The target molecule can be any molecule of interest. For example, the aptamer can be used to bind to a ligand-binding domain of a protein, thereby preventing interaction of the naturally occurring ligand with the protein. This is a non-limiting example and those in the art will recognize that other embodiments can be readily generated using techniques generally known in the art (see, for example, Gold et al., 1995, Annu. Rev. Biochem., 64, 763; Brody and Gold, 2000, J. Biotechnol., 74, 5; Sun, 2000, Curr. Opin. Mol. Ther., 2, 100; Kusser, 2000, J. Biotechnol., 74, 27; Hermann and Patel, 2000, Science, 287, 820; and Jayasena, 1999, Clinical Chemistry, 45, 1628.)

[0144] In yet another embodiment, a non-nucleotide linker of the invention comprises abasic nucleotide, polyether, polyamine, polyamide, peptide, carbohydrate, lipid, polyhydrocarbon, or other polymeric compounds (e.g., polyethylene glycols such as those having between 2 and 100 ethylene glycol units). Specific examples include those described by Seela and Kaiser, Nucleic Acids Res. 1990, 18:6353 and Nucleic Acids Res. 1987, 15:3113; Cload and Schepartz, J. Am. Chem. Soc. 1991, 113:6324; Richardson and Schepartz, J. Am. Chem. Soc. 1991, 113:5109; Ma et al., Nucleic Acids Res. 1993, 21:2585 and Biochemistry 1993, 32:1751; Durand et al, Nucleic Acids Res. 1990, 18:6353; McCurdy et al., Nucleosides & Nucleotides 1991, 10:287; Jschke et al., Tetrahedron Lett. 1993, 34:301; Ono et al., Biochemistry 1991, 30:9914; Arnold et al., International Publication No. WO 89/02439; Usman et al., International Publication No. WO 95/06731; Dudycz et al, International Publication No. WO 95/11910 and Ferentz and Verdine, J. Am. Chem. Soc. 1991, 113:4000, all hereby incorporated by reference herein. A “non-nucleotide” further means any group or compound that can be incorporated into a nucleic acid chain in the place of one or more nucleotide units, including either sugar and/or phosphate substitutions, and allows the remaining bases to exhibit their enzymatic activity. The group or compound can be abasic in that it does not contain a commonly recognized nucleotide base, such as adenosine, guanine, cytosine, uracil or thymine, for example at the C1 position of the sugar.

[0145] In one embodiment, the invention features a chemically-modified short interfering nucleic acid molecule (siNA) capable of mediating RNA interference (RNAi) against a target gene inside a cell or reconstituted in vitro system, wherein the chemical modification comprises a conjugate covalently attached to the chemically-modified siNA molecule. Non-limiting examples of conjugates contemplated by the invention include conjugates and ligands described in Vargeese et al., U.S. Ser. No. 10/427,160, filed Apr. 30, 2003, incorporated by reference herein in its entirety, including the drawings. In another embodiment, the conjugate is covalently attached to the chemically-modified siNA molecule via a biodegradable linker. In one embodiment, the conjugate molecule is attached at the 3′-end of either the sense strand, the antisense strand, or both strands of the chemically-modified siNA molecule. In another embodiment, the conjugate molecule is attached at the 5′-end of either the sense strand, the antisense strand, or both strands of the chemically-modified siNA molecule. In yet another embodiment, the conjugate molecule is attached both the 3′-end and 5′-end of either the sense strand, the antisense strand, or both strands of the chemically-modified siNA molecule, or any combination thereof. In one embodiment, a conjugate molecule of the invention comprises a molecule that facilitates delivery of a chemically-modified siNA molecule into a biological system, such as a cell. In another embodiment, the conjugate molecule attached to the chemically-modified siNA molecule is a polyethylene glycol, human serum albumin, or a ligand for a cellular receptor that can mediate cellular uptake. Examples of specific conjugate molecules contemplated by the instant invention that can be attached to chemically-modified siNA molecules are described in Vargeese et al., U.S. Ser. No. 10/201,394, incorporated by reference herein. The type of conjugates used and the extent of conjugation of siNA molecules of the invention can be evaluated for improved pharmacokinetic profiles, bioavailability, and/or stability of siNA constructs while at the same time maintaining the ability of the siNA to mediate RNAi activity. As such, one skilled in the art can screen siNA constructs that are modified with various conjugates to determine whether the siNA conjugate complex possesses improved properties while maintaining the ability to mediate RNAi, for example in animal models as are generally known in the art.

[0146] In one embodiment, the invention features a short interfering nucleic acid (siNA) molecule capable of mediating RNA interference (RNAi) inside a cell or reconstituted in vitro system, wherein one or both strands of the siNA molecule that are assembled from two separate oligonucleotides do not comprise any ribonucleotides. For example, a siNA molecule can be assembled from a single oligonucleotide where the sense and antisense regions of the siNA comprise separate oligonucleotides that do not have any ribonucleotides (e.g., nucleotides having a 2′-OH group) present in the oligonucleotides. In another example, a siNA molecule can be assembled from a single oligonucleotide where the sense and antisense regions of the siNA are linked or circularized by a nucleotide or non-nucleotide linker as described herein, wherein the oligonucleotide does not have any ribonucleotides (e.g., nucleotides having a 2′-OH group) present in the oligonucleotide. Applicant has surprisingly found that the presence of ribonucleotides (e.g., nucleotides having a 2′-hydroxyl group) within the siNA molecule is not required or essential to support RNAi activity. As such, in one embodiment, all positions within the siNA can include chemically modified nucleotides and/or non-nucleotides such as nucleotides and or non-nucleotides having Formula I, II, III, IV, V, VI, or VII or any combination thereof to the extent that the ability of the siNA molecule to support RNAi activity in a cell is maintained.

[0147] In one embodiment, the invention features a siNA molecule that does not require the presence of a 2′-OH group (ribonucleotide) to be present within the siNA molecule to support RNA interference.

[0148] In one embodiment, a siNA molecule of the invention is a single stranded siNA molecule that mediates RNAi activity in a cell or reconstituted in vitro system, wherein the siNA molecule comprises a single stranded polynucleotide having complementarity to a target nucleic acid sequence. In another embodiment, the single stranded siNA molecule of the invention comprises a 5′-terminal phosphate group. In another embodiment, the single stranded siNA molecule of the invention comprises a 5′-terminal phosphate group and a 3′-terminal phosphate group (e.g., a 2′,3′-cyclic phosphate). In another embodiment, the single stranded siNA molecule of the invention comprises about 19 to about 29 (e.g., about 19, 20, 21, 22, 23, 24, 25, 26, 27, 28, or 29) nucleotides. In yet another embodiment, the single stranded siNA molecule of the invention comprises one or more chemically modified nucleotides or non-nucleotides described herein. For example, all the positions within the siNA molecule can include chemically-modified nucleotides such as nucleotides having any of Formulae I-VII, or any combination thereof to the extent that the ability of the siNA molecule to support RNAi activity in a cell is maintained.

[0149] In one embodiment, the single stranded siNA molecule having complementarity to a target nucleic acid sequence comprises one or more 2′-deoxy-2′-fluoro pyrimidine nucleotides (e.g., wherein all pyrimidine nucleotides are 2′-deoxy-2′-fluoro pyrimidine nucleotides or alternately a plurality of pyrimidine nucleotides are 2′-deoxy-2′-fluoro pyrimidine nucleotides), and one or more 2′-O-methyl purine nucleotides (e.g., wherein all purine nucleotides are 2′-O-methyl purine nucleotides or alternately a plurality of purine nucleotides are 2′-O-methyl purine nucleotides). In another embodiment, the single stranded siNA molecule comprises one or more 2′-deoxy-2′-fluoro pyrimidine nucleotides (e.g., wherein all pyrimidine nucleotides are 2′-deoxy-2′-fluoro pyrimidine nucleotides or alternately a plurality of pyrimidine nucleotides are 2′-deoxy-2′-fluoro pyrimidine nucleotides), and one or more 2′-deoxy purine nucleotides (e.g., wherein all purine nucleotides are 2′-deoxy purine nucleotides or alternately a plurality of purine nucleotides are 2′-deoxy purine nucleotides). In another embodiment, the single stranded siNA molecule comprises one or more 2′-deoxy-2′-fluoro pyrimidine nucleotides (e.g., wherein all pyrimidine nucleotides are 2′-deoxy-2′-fluoro pyrimidine nucleotides or alternately a plurality of pyrimidine nucleotides are 2′-deoxy-2′-fluoro pyrimidine nucleotides), wherein any purine nucleotides present in the antisense region are locked nucleic acid (LNA) nucleotides (e.g., wherein all purine nucleotides are LNA nucleotides or alternately a plurality of purine nucleotides are LNA nucleotides). In another embodiment, the single stranded siNA molecule comprises one or more 2′-deoxy-2′-fluoro pyrimidine nucleotides (e.g., wherein all pyrimidine nucleotides are 2′-deoxy-2′-fluoro pyrimidine nucleotides or alternately a plurality of pyrimidine nucleotides are 2′-deoxy-2′-fluoro pyrimidine nucleotides), and one or more 2′-methoxyethyl purine nucleotides (e.g., wherein all purine nucleotides are 2′-methoxyethyl purine nucleotides or alternately a plurality of purine nucleotides are 2′-methoxyethyl purine nucleotides), the single stranded siNA can comprise a terminal cap modification, such as any modification described herein or shown in FIG. 22, that is optionally present at the 3′-end, the 5′-end, or both of the 3′ and 5′-ends of the antisense sequence. The single stranded siNA optionally further comprises about 1 to about 4 (e.g., about 1, 2, 3, or 4) terminal 2′-deoxynucleotides at the 3′-end of the siNA molecule, wherein the terminal nucleotides can further comprise one or more (e.g., 1, 2, 3, or 4) phosphorothioate internucleotide linkages. The single stranded siNA optionally further comprises a terminal phosphate group, such as a 5′-terminal phosphate group.

[0150] In one embodiment, a siNA molecule of the invention is a single stranded siNA molecule that mediates RNAi activity in a cell or reconstituted in vitro system, wherein the siNA molecule comprises a single stranded polynucleotide having complementarity to a target nucleic acid sequence, and wherein one or more pyrimidine nucleotides present in the siNA are 2′-deoxy-2′-fluoro pyrimidine nucleotides (e.g., wherein all pyrimidine nucleotides are 2′-deoxy-2′-fluoro pyrimidine nucleotides or alternately a plurality of pyrimidine nucleotides are 2′-deoxy-2′-fluoro pyrimidine nucleotides), and wherein any purine nucleotides present in the antisense region are 2′-O-methyl purine nucleotides (e.g., wherein all purine nucleotides are 2′-O-methyl purine nucleotides or alternately a plurality of purine nucleotides are 2′-O-methyl purine nucleotides), and a terminal cap modification, such as any modification described herein or shown in FIG. 22, that is optionally present at the 3′-end, the 5′-end, or both of the 3′ and 5′-ends of the antisense sequence. The siNA optionally further comprises about 1 to about 4 or more (e.g., about 1, 2, 3, 4 or more) terminal 2′-deoxynucleotides at the 3′-end of the siNA molecule, wherein the terminal nucleotides can further comprise one or more (e.g., 1, 2, 3, 4 or more) phosphorothioate, phosphonoacetate, and/or thiophosphonoacetate internucleotide linkages, and wherein the siNA optionally further comprises a terminal phosphate group, such as a 5′-terminal phosphate group. In any of these embodiments, any purine nucleotides present in the antisense region are alternatively 2′-deoxy purine nucleotides (e.g., wherein all purine nucleotides are 2′-deoxy purine nucleotides or alternately a plurality of purine nucleotides are 2′-deoxy purine nucleotides). Also, in any of these embodiments, any purine nucleotides present in the siNA (i.e., purine nucleotides present in the sense and/or antisense region) can alternatively be locked nucleic acid (LNA) nucleotides (e.g., wherein all purine nucleotides are LNA nucleotides or alternately a plurality of purine nucleotides are LNA nucleotides). Also, in any of these embodiments, any purine nucleotides present in the siNA are alternatively 2′-methoxyethyl purine nucleotides (e.g., wherein all purine nucleotides are 2′-methoxyethyl purine nucleotides or alternately a plurality of purine nucleotides are 2′-methoxyethyl purine nucleotides). In another embodiment, any modified nucleotides present in the single stranded siNA molecules of the invention comprise modified nucleotides having properties or characteristics similar to naturally occurring ribonucleotides. For example, the invention features siNA molecules including modified nucleotides having a Northern conformation (e.g., Northern pseudorotation cycle, see for example Saenger, Principles of Nucleic Acid Structure, Springer-Verlag ed., 1984). As such, chemically modified nucleotides present in the single stranded siNA molecules of the invention are preferably resistant to nuclease degradation while at the same time maintaining the capacity to mediate RNAi

[0151] In one embodiment, a siNA molecule of the invention is a single stranded siNA molecule that mediates RNAi activity in a cell or reconstituted in vitro system, wherein the siNA molecule comprises a single stranded polynucleotide having complementarity to a target nucleic acid sequence, and wherein one or more pyrimidine nucleotides present in the siNA are 2′-deoxy-2′-fluoro pyrimidine nucleotides (e.g., wherein all pyrimidine nucleotides are 2′-deoxy-2′-fluoro pyrimidine nucleotides or alternately a plurality of pyrimidine nucleotides are 2′-deoxy-2′-fluoro pyrimidine nucleotides), and wherein any purine nucleotides present in the siNA are 2′-O-methyl purine nucleotides (e.g., wherein all purine nucleotides are 2′-O-methyl purine nucleotides or alternately a plurality of purine nucleotides are 2′-O-methyl purine nucleotides), and a terminal cap modification, such as any modification described herein or shown in FIG. 22, that is optionally present at the 3′-end, the 5′-end, or both of the 3′ and 5′-ends of the antisense sequence, the siNA optionally further comprising about 1 to about 4 (e.g., about 1, 2, 3, or 4) terminal 2′-deoxynucleotides at the 3′-end of the siNA molecule, wherein the terminal nucleotides can further comprise one or more (e.g., 1, 2, 3, or 4) phosphorothioate internucleotide linkages, and wherein the siNA optionally further comprises a terminal phosphate group, such as a 5′-terminal phosphate group.

[0152] In one embodiment, a siNA molecule of the invention is a single stranded siNA molecule that mediates RNAi activity in a cell or reconstituted in vitro system, wherein the siNA molecule comprises a single stranded polynucleotide having complementarity to a target nucleic acid sequence, and wherein one or more pyrimidine nucleotides present in the siNA are 2′-deoxy-2′-fluoro pyrimidine nucleotides (e.g., wherein all pyrimidine nucleotides are 2′-deoxy-2′-fluoro pyrimidine nucleotides or alternately a plurality of pyrimidine nucleotides are 2′-deoxy-2′-fluoro pyrimidine nucleotides), and wherein any purine nucleotides present in the siNA are 2′-deoxy purine nucleotides (e.g., wherein all purine nucleotides are 2′-deoxy purine nucleotides or alternately a plurality of purine nucleotides are 2′-deoxy purine nucleotides), and a terminal cap modification, such as any modification described herein or shown in FIG. 22, that is optionally present at the 3′-end, the 5′-end, or both of the 3′ and 5′-ends of the antisense sequence, the siNA optionally further comprising about 1 to about 4 (e.g., about 1, 2, 3, or 4) terminal 2′-deoxynucleotides at the 3′-end of the siNA molecule, wherein the terminal nucleotides can further comprise one or more (e.g., 1, 2, 3, or 4) phosphorothioate internucleotide linkages, and wherein the siNA optionally further comprises a terminal phosphate group, such as a 5′-terminal phosphate group.

[0153] In one embodiment, a siNA molecule of the invention is a single stranded siNA molecule that mediates RNAi activity in a cell or reconstituted in vitro system, wherein the siNA molecule comprises a single stranded polynucleotide having complementarity to a target nucleic acid sequence, and wherein one or more pyrimidine nucleotides present in the siNA are 2′-deoxy-2′-fluoro pyrimidine nucleotides (e.g., wherein all pyrimidine nucleotides are 2′-deoxy-2′-fluoro pyrimidine nucleotides or alternately a plurality of pyrimidine nucleotides are 2′-deoxy-2′-fluoro pyrimidine nucleotides), and wherein any purine nucleotides present in the siNA are locked nucleic acid (LNA) nucleotides (e.g., wherein all purine nucleotides are LNA nucleotides or alternately a plurality of purine nucleotides are LNA nucleotides), and a terminal cap modification, such as any modification described herein or shown in FIG. 22, that is optionally present at the 3′-end, the 5′-end, or both of the 3′ and 5′-ends of the antisense sequence, the siNA optionally further comprising about 1 to about 4 (e.g., about 1, 2, 3, or 4) terminal 2′-deoxynucleotides at the 3′-end of the siNA molecule, wherein the terminal nucleotides can further comprise one or more (e.g., 1, 2, 3, or 4) phosphorothioate internucleotide linkages, and wherein the siNA optionally further comprises a terminal phosphate group, such as a 5′-terminal phosphate group.

[0154] In one embodiment, a siNA molecule of the invention is a single stranded siNA molecule that mediates RNAi activity in a cell or reconstituted in vitro system, wherein the siNA molecule comprises a single stranded polynucleotide having complementarity to a target nucleic acid sequence, and wherein one or more pyrimidine nucleotides present in the siNA are 2′-deoxy-2′-fluoro pyrimidine nucleotides (e.g., wherein all pyrimidine nucleotides are 2′-deoxy-2′-fluoro pyrimidine nucleotides or alternately a plurality of pyrimidine nucleotides are 2′-deoxy-2′-fluoro pyrimidine nucleotides), and wherein any purine nucleotides present in the siNA are 2′-methoxyethyl purine nucleotides (e.g., wherein all purine nucleotides are 2′-methoxyethyl purine nucleotides or alternately a plurality of purine nucleotides are 2′-methoxyethyl purine nucleotides), and a terminal cap modification, such as any modification described herein or shown in FIG. 22, that is optionally present at the 3′-end, the 5′-end, or both of the 3′ and 5′-ends of the antisense sequence, the siNA optionally further comprising about 1 to about 4 (e.g., about 1, 2, 3, or 4) terminal 2′-deoxynucleotides at the 3′-end of the siNA molecule, wherein the terminal nucleotides can further comprise one or more (e.g., 1, 2, 3, or 4) phosphorothioate internucleotide linkages, and wherein the siNA optionally further comprises a terminal phosphate group, such as a 5′-terminal phosphate group.

[0155] In another embodiment, any modified nucleotides present in the single stranded siNA molecules of the invention comprise modified nucleotides having properties or characteristics similar to naturally occurring ribonucleotides. For example, the invention features siNA molecules including modified nucleotides having a Northern conformation (e.g., Northern pseudorotation cycle, see for example Saenger, Principles of Nucleic Acid Structure, Springer-Verlag ed., 1984). As such, chemically modified nucleotides present in the single stranded siNA molecules of the invention are preferably resistant to nuclease degradation while at the same time maintaining the capacity to mediate RNAi.

[0156] In one embodiment, the invention features a method for modulating the expression of a gene within a cell comprising: (a) synthesizing a siNA molecule of the invention, which can be chemically-modified, wherein one of the siNA strands comprises a sequence complementary to RNA of the gene; and (b) introducing the siNA molecule into a cell under conditions suitable to modulate the expression of the gene in the cell.

[0157] In one embodiment, the invention features a method for modulating the expression of a gene within a cell comprising: (a) synthesizing a siNA molecule of the invention, which can be chemically-modified, wherein one of the siNA strands comprises a sequence complementary to RNA of the gene and wherein the sense strand sequence of the siNA comprises a sequence substantially similar to the sequence of the target RNA; and (b) introducing the siNA molecule into a cell under conditions suitable to modulate the expression of the gene in the cell.

[0158] In another embodiment, the invention features a method for modulating the expression of more than one gene within a cell comprising: (a) synthesizing siNA molecules of the invention, which can be chemically-modified, wherein one of the siNA strands comprises a sequence complementary to RNA of the genes; and (b) introducing the siNA molecules into a cell under conditions suitable to modulate the expression of the genes in the cell.

[0159] In another embodiment, the invention features a method for modulating the expression of more than one gene within a cell comprising: (a) synthesizing a siNA molecule of the invention, which can be chemically-modified, wherein one of the siNA strands comprises a sequence complementary to RNA of the gene and wherein the sense strand sequence of the siNA comprises a sequence substantially similar to the sequence of the target RNA; and (b) introducing the siNA molecules into a cell under conditions suitable to modulate the expression of the genes in the cell.

[0160] In one embodiment, siNA molecules of the invention are used as reagents in ex vivo applications. For example, siNA reagents are introduced into tissue or cells that are transplanted into a subject for therapeutic effect. The cells and/or tissue can be derived from an organism or subject that later receives the explant, or can be derived from another organism or subject prior to transplantation. The siNA molecules can be used to modulate the expression of one or more genes in the cells or tissue, such that the cells or tissue obtain a desired phenotype or are able to perform a function when transplanted in vivo. In one embodiment, certain target cells from a patient are extracted. These extracted cells are contacted with siNAs targeting a specific nucleotide sequence within the cells under conditions suitable for uptake of the siNAs by these cells (e.g., using delivery reagents such as cationic lipids, liposomes and the like or using techniques such as electroporation to facilitate the delivery of siNAs into cells). The cells are then reintroduced back into the same patient or other patients. Non-limiting examples of ex vivo applications include use in organ/tissue transplant, tissue grafting, or treatment of pulmonary disease (e.g., restenosis) or prevent neointimal hyperplasia and atherosclerosis in vein grafts. Such ex vivo applications may also used to treat conditions associated with coronary and peripheral bypass graft failure, for example, such methods can be used in conjunction with peripheral vascular bypass graft surgery and coronary artery bypass graft surgery. Additional applications include transplants to treat CNS lesions or injury, including use in treatment of neurodegenerative conditions such as Alzheimer's disease, Parkinson's Disease, Epilepsy, Dementia, Huntington's disease, or amyotrophic lateral sclerosis (ALS).

[0161] In one embodiment, the invention features a method of modulating the expression of a gene in a tissue explant comprising: (a) synthesizing a siNA molecule of the invention, which can be chemically-modified, wherein one of the siNA strands comprises a sequence complementary to RNA of the gene; and (b) introducing the siNA molecule into a cell of the tissue explant derived from a particular organism under conditions suitable to modulate the expression of the gene in the tissue explant. In another embodiment, the method further comprises introducing the tissue explant back into the organism the tissue was derived from or into another organism under conditions suitable to modulate the expression of the gene in that organism.

[0162] In one embodiment, the invention features a method of modulating the expression of a gene in a tissue explant comprising: (a) synthesizing a siNA molecule of the invention, which can be chemically-modified, wherein one of the siNA strands comprises a sequence complementary to RNA of the gene and wherein the sense strand sequence of the siNA comprises a sequence substantially similar to the sequence of the target RNA; and (b) introducing the siNA molecule into a cell of the tissue explant derived from a particular organism under conditions suitable to modulate the expression of the gene in the tissue explant. In another embodiment, the method further comprises introducing the tissue explant back into the organism the tissue was derived from or into another organism under conditions suitable to modulate the expression of the gene in that organism.

[0163] In another embodiment, the invention features a method of modulating the expression of more than one gene in a tissue explant comprising: (a) synthesizing siNA molecules of the invention, which can be chemically-modified, wherein one of the siNA strands comprises a sequence complementary to RNA of the genes; and (b) introducing the siNA molecules into a cell of the tissue explant derived from a particular organism under conditions suitable to modulate the expression of the genes in the tissue explant. In another embodiment, the method further comprises introducing the tissue explant back into the organism the tissue was derived from or into another organism under conditions suitable to modulate the expression of the genes in that organism.

[0164] In one embodiment, the invention features a method of modulating the expression of a gene in an organism comprising: (a) synthesizing a siNA molecule of the invention, which can be chemically-modified, wherein one of the siNA strands comprises a sequence complementary to RNA of the gene; and (b) introducing the siNA molecule into the organism under conditions suitable to modulate the expression of the gene in the organism.

[0165] In another embodiment, the invention features a method of modulating the expression of more than one gene in an organism comprising: (a) synthesizing siNA molecules of the invention, which can be chemically-modified, wherein one of the siNA strands comprises a sequence complementary to RNA of the genes; and (b) introducing the siNA molecules into the organism under conditions suitable to modulate the expression of the genes in the organism.

[0166] In one embodiment, the invention features a method for modulating the expression of a gene within a cell comprising: (a) synthesizing a siNA molecule of the invention, which can be chemically-modified, wherein the siNA comprises a single stranded sequence having complementarity to RNA of the gene; and (b) introducing the siNA molecule into a cell under conditions suitable to modulate the expression of the gene in the cell.

[0167] In one embodiment, the invention features a method of modulating the expression of a target gene in an tissue or organ comprising: (a) synthesizing a siNA molecule of the invention, which can be chemically-modified, wherein the siNA comprises a single stranded sequence having complementarity to RNA of the target gene; and (b) introducing the siNA molecule into the tissue or organ under conditions suitable to modulate the expression of the target gene in the organism. In another embodiment, the tissue is ocular tissue and the organ is the eye. In another embodiment, the tissue comprises hepatocytes and/or hepatic tissue and the organ is the liver.

[0168] In another embodiment, the invention features a method for modulating the expression of more than one gene within a cell comprising: (a) synthesizing siNA molecules of the invention, which can be chemically-modified, wherein the siNA comprises a single stranded sequence having complementarity to RNA of the gene; and (b) contacting the siNA molecule with a cell in vitro or in vivo under conditions suitable to modulate the expression of the genes in the cell.

[0169] In one embodiment, the invention features a method of modulating the expression of a gene in a tissue explant comprising: (a) synthesizing a siNA molecule of the invention, which can be chemically-modified, wherein the siNA comprises a single stranded sequence having complementarity to RNA of the gene; and (b) contacting the siNA molecule with a cell of the tissue explant derived from a particular organism under conditions suitable to modulate the expression of the gene in the tissue explant. In another embodiment, the method further comprises introducing the tissue explant back into the organism the tissue was derived from or into another organism under conditions suitable to modulate the expression of the gene in that organism.

[0170] In another embodiment, the invention features a method of modulating the expression of more than one gene in a tissue explant comprising: (a) synthesizing siNA molecules of the invention, which can be chemically-modified, wherein the siNA comprises a single stranded sequence having complementarity to RNA of the gene; and (b) introducing the siNA molecules into a cell of the tissue explant derived from a particular organism under conditions suitable to modulate the expression of the genes in the tissue explant. In another embodiment, the method further comprises introducing the tissue explant back into the organism the tissue was derived from or into another organism under conditions suitable to modulate the expression of the genes in that organism.

[0171] In one embodiment, the invention features a method of modulating the expression of a gene in an organism comprising: (a) synthesizing a siNA molecule of the invention, which can be chemically-modified, wherein the siNA comprises a single stranded sequence having complementarity to RNA of the gene; and (b) introducing the siNA molecule into the organism under conditions suitable to modulate the expression of the gene in the organism.

[0172] In another embodiment, the invention features a method of modulating the expression of more than one gene in an organism comprising: (a) synthesizing siNA molecules of the invention, which can be chemically-modified, wherein the siNA comprises a single stranded sequence having complementarity to RNA of the gene; and (b) introducing the siNA molecules into the organism under conditions suitable to modulate the expression of the genes in the organism.

[0173] In one embodiment, the invention features a method of modulating the expression of a gene in an organism comprising contacting the organism with a siNA molecule of the invention under conditions suitable to modulate the expression of the gene in the organism.

[0174] In another embodiment, the invention features a method of modulating the expression of more than one gene in an organism comprising contacting the organism with one or more siNA molecules of the invention under conditions suitable to modulate the expression of the genes in the organism.

[0175] The siNA molecules of the invention can be designed to down regulate or inhibit target gene expression through RNAi targeting of a variety of RNA molecules. In one embodiment, the siNA molecules of the invention are used to target various RNAs corresponding to a target gene. Non-limiting examples of such RNAs include messenger RNA (mRNA), alternate RNA splice variants of target gene(s), post-transcriptionally modified RNA of target gene(s), pre-mRNA of target gene(s), and/or RNA templates. If alternate splicing produces a family of transcripts that are distinguished by usage of appropriate exons, the instant invention can be used to inhibit gene expression through the appropriate exons to specifically inhibit or to distinguish among the functions of gene family members. For example, a protein that contains an alternatively spliced transmembrane domain can be expressed in both membrane bound and secreted forms. Use of the invention to target the exon containing the transmembrane domain can be used to determine the functional consequences of pharmaceutical targeting of membrane bound as opposed to the secreted form of the protein. Non-limiting examples of applications of the invention relating to targeting these RNA molecules include therapeutic pharmaceutical applications, pharmaceutical discovery applications, molecular diagnostic and gene function applications, and gene mapping, for example using single nucleotide polymorphism mapping with siNA molecules of the invention. Such applications can be implemented using known gene sequences or from partial sequences available from an expressed sequence tag (EST).

[0176] In another embodiment, the siNA molecules of the invention are used to target conserved sequences corresponding to a gene family or gene families. As such, siNA molecules targeting multiple gene targets can provide increased therapeutic effect. In addition, siNA can be used to characterize pathways of gene function in a variety of applications. For example, the present invention can be used to inhibit the activity of target gene(s) in a pathway to determine the function of uncharacterized gene(s) in gene function analysis, mRNA function analysis, or translational analysis. The invention can be used to determine potential target gene pathways involved in various diseases and conditions toward pharmaceutical development. The invention can be used to understand pathways of gene expression involved in, for example, in development, such as prenatal development and postnatal development, and/or the progression and/or maintenance of cancer, infectious disease, autoimmunity, inflammation, endocrine disorders, renal disease, pulmonary disease, cardiovascular disease, birth defects, ageing, hair growth, any other disease, condition, trait, genotype or phenotype related to gene expression.

[0177] In one embodiment, siNA molecule(s) and/or methods of the invention are used to down-regulate or inhibit the expression of gene(s) that encode RNA referred to by Genbank Accession, for example genes encoding RNA sequence(s) referred to herein by Genbank Accession number.

[0178] In one embodiment, the invention features a method comprising: (a) generating a library of siNA constructs having a predetermined complexity; and (b) assaying the siNA constructs of (a) above, under conditions suitable to determine RNAi target sites within the target RNA sequence. In one embodiment, the siNA molecules of (a) have strands of a fixed length, for example, about 23 nucleotides in length. In another embodiment, the siNA molecules of (a) are of differing length, for example having strands of about 19 to about 25 (e.g., about 19, 20, 21, 22, 23, 24, or 25) nucleotides in length. In one embodiment, the assay can comprise a reconstituted in vitro siNA assay as described herein. In another embodiment, the assay can comprise a cell culture system in which target RNA is expressed. In another embodiment, fragments of target RNA are analyzed for detectable levels of cleavage, for example by gel electrophoresis, northern blot analysis, or RNAse protection assays, to determine the most suitable target site(s) within the target RNA sequence. The target RNA sequence can be obtained as is known in the art, for example, by cloning and/or transcription for in vitro systems, and by cellular expression in in vivo systems.

[0179] In one embodiment, the invention features a method comprising: (a) generating a randomized library of siNA constructs having a predetermined complexity, such as of 4^{N}, where N represents the number of base paired nucleotides in each of the siNA construct strands (eg. for a siNA construct having 21 nucleotide sense and antisense strands with 19 base pairs, the complexity would be 4¹⁹); and (b) assaying the siNA constructs of (a) above, under conditions suitable to determine RNAi target sites within the target RNA sequence. In another embodiment, the siNA molecules of (a) have strands of a fixed length, for example about 23 nucleotides in length. In yet another embodiment, the siNA molecules of (a) are of differing length, for example having strands of about 19 to about 25 (e.g., about 19, 20, 21, 22, 23, 24, or 25) nucleotides in length. In one embodiment, the assay can comprise a reconstituted in vitro siNA assay as described in Example 7 herein. In another embodiment, the assay can comprise a cell culture system in which target RNA is expressed. In another embodiment, fragments of target RNA are analyzed for detectable levels of cleavage, for example by gel electrophoresis, northern blot analysis, or RNAse protection assays, to determine the most suitable target site(s) within the target RNA sequence. In another embodiment, the target RNA sequence can be obtained as is known in the art, for example, by cloning and/or transcription for in vitro systems, and by cellular expression in in vivo systems.

[0180] In another embodiment, the invention features a method comprising: (a) analyzing the sequence of a RNA target encoded by a target gene; (b) synthesizing one or more sets of siNA molecules having sequence complementary to one or more regions of the RNA of (a); and (c) assaying the siNA molecules of (b) under conditions suitable to determine RNAi targets within the target RNA sequence. In one embodiment, the siNA molecules of (b) have strands of a fixed length, for example about 23 nucleotides in length. In another embodiment, the siNA molecules of (b) are of differing length, for example having strands of about 19 to about 25 (e.g., about 19, 20, 21, 22, 23, 24, or 25) nucleotides in length. In one embodiment, the assay can comprise a reconstituted in vitro siNA assay as described herein. In another embodiment, the assay can comprise a cell culture system in which target RNA is expressed. Fragments of target RNA are analyzed for detectable levels of cleavage, for example by gel electrophoresis, northern blot analysis, or RNAse protection assays, to determine the most suitable target site(s) within the target RNA sequence. The target RNA sequence can be obtained as is known in the art, for example, by cloning and/or transcription for in vitro systems, and by expression in in vivo systems.

[0181] By “target site” is meant a sequence within a target RNA that is “targeted” for cleavage mediated by a siNA construct which contains sequences within its antisense region that are complementary to the target sequence.

[0182] By “detectable level of cleavage” is meant cleavage of target RNA (and formation of cleaved product RNAs) to an extent sufficient to discern cleavage products above the background of RNAs produced by random degradation of the target RNA. Production of cleavage products from 1-5% of the target RNA is sufficient to detect above the background for most methods of detection.

[0183] In one embodiment, the invention features a composition comprising a siNA molecule of the invention, which can be chemically-modified, in a pharmaceutically acceptable carrier or diluent. In another embodiment, the invention features a pharmaceutical composition comprising siNA molecules of the invention, which can be chemically-modified, targeting one or more genes in a pharmaceutically acceptable carrier or diluent. In another embodiment, the invention features a method for diagnosing a disease, condition, trait, genotype or phenotype in a subject comprising administering to the subject a composition of the invention under conditions suitable for the diagnosis of the disease, condition, trait, genotype or phenotype in the subject.

[0184] In one embodiment, the invention features a method for treating or preventing a disease, condition, trait, genotype or phenotype in a subject, comprising administering to the subject a composition of the invention under conditions suitable for the treatment or prevention of the disease, condition, trait, genotype or phenotype in the subject, alone or in conjunction with one or more other therapeutic compounds. In yet another embodiment, the invention features a method for reducing or preventing tissue rejection in a subject comprising administering to the subject a composition of the invention under conditions suitable for the reduction or prevention of tissue rejection in the subject.

[0185] In one embodiment, the invention features a method for alleviating the symptoms of a disease, condition, trait, genotype or phenotype in a subject, comprising administering to the subject a composition of the invention (alone or in combination (simultaneously or sequentially) with one or more other therapeutic compounds) under conditions suitable for alleviating the symptoms of the disease, condition, trait, genotype or phenotype in the subject.

[0186] In another embodiment, the invention features a method for validating a gene target, comprising: (a) synthesizing a siNA molecule of the invention, which can be chemically-modified, wherein one of the siNA strands includes a sequence complementary to RNA of a target gene; (b) introducing the siNA molecule into a cell, tissue, or organism under conditions suitable for modulating expression of the target gene in the cell, tissue, or organism; and (c) determining the function of the gene by assaying for any phenotypic change in the cell, tissue, or organism.

[0187] In another embodiment, the invention features a method for validating a target gene comprising: (a) synthesizing a siNA molecule of the invention, which can be chemically-modified, wherein one of the siNA strands includes a sequence complementary to RNA of a target gene; (b) introducing the siNA molecule into a biological system under conditions suitable for modulating expression of the target gene in the biological system; and (c) determining the function of the gene by assaying for any phenotypic change in the biological system.

[0188] By “biological system” is meant, material, in a purified or unpurified form, from biological sources, including but not limited to human, animal, plant, insect, bacterial, viral or other sources, wherein the system comprises the components required for RNAi activity. The term “biological system” includes, for example, a cell, tissue, or organism, or extract thereof. The term biological system also includes reconstituted RNAi systems that can be used in an in vitro setting.

[0189] By “phenotypic change” is meant any detectable change to a cell that occurs in response to contact or treatment with a nucleic acid molecule of the invention (e.g., siNA). Such detectable changes include, but are not limited to, changes in shape, size, proliferation, motility, protein expression or RNA expression or other physical or chemical changes as can be assayed by methods known in the art. The detectable change can also include expression of reporter genes/molecules such as Green Florescent Protein (GFP) or various tags that are used to identify an expressed protein or any other cellular component that can be assayed.

[0190] In one embodiment, the invention features a kit containing a siNA molecule of the invention, which can be chemically-modified, that can be used to modulate the expression of a target gene in biological system, including, for example, in a cell, tissue, or organism. In another embodiment, the invention features a kit containing more than one siNA molecule of the invention, which can be chemically-modified, that can be used to modulate the expression of more than one target gene in a biological system, including, for example, in a cell, tissue, or organism.

[0191] In one embodiment, the invention features a kit containing a siNA molecule of the invention, which can be chemically-modified, that can be used to modulate the expression of a target gene in a biological system. In another embodiment, the invention features a kit containing more than one siNA molecule of the invention, which can be chemically-modified, that can be used to modulate the expression of more than one target gene in a biological system.

[0192] In one embodiment, the invention features a cell containing one or more siNA molecules of the invention, which can be chemically-modified. In another embodiment, the cell containing a siNA molecule of the invention is a mammalian cell. In yet another embodiment, the cell containing a siNA molecule of the invention is a human cell.

[0193] In one embodiment, the synthesis of a siNA molecule of the invention, which can be chemically-modified, comprises: (a) synthesis of two complementary strands of the siNA molecule; (b) annealing the two complementary strands together under conditions suitable to obtain a double-stranded siNA molecule. In another embodiment, synthesis of the two complementary strands of the siNA molecule is by solid phase oligonucleotide synthesis. In yet another embodiment, synthesis of the two complementary strands of the siNA molecule is by solid phase tandem oligonucleotide synthesis.

[0194] In one embodiment, the invention features a method for synthesizing a siNA duplex molecule comprising: (a) synthesizing a first oligonucleotide sequence strand of the siNA molecule, wherein the first oligonucleotide sequence strand comprises a cleavable linker molecule that can be used as a scaffold for the synthesis of the second oligonucleotide sequence strand of the siNA; (b) synthesizing the second oligonucleotide sequence strand of siNA on the scaffold of the first oligonucleotide sequence strand, wherein the second oligonucleotide sequence strand further comprises a chemical moiety than can be used to purify the siNA duplex; (c) cleaving the linker molecule of (a) under conditions suitable for the two siNA oligonucleotide strands to hybridize and form a stable duplex; and (d) purifying the siNA duplex utilizing the chemical moiety of the second oligonucleotide sequence strand. In one embodiment, cleavage of the linker molecule in (c) above takes place during deprotection of the oligonucleotide, for example, under hydrolysis conditions using an alkylamine base such as methylamine. In one embodiment, the method of synthesis comprises solid phase synthesis on a solid support such as controlled pore glass (CPG) or polystyrene, wherein the first sequence of (a) is synthesized on a cleavable linker, such as a succinyl linker, using the solid support as a scaffold. The cleavable linker in (a) used as a scaffold for synthesizing the second strand can comprise similar reactivity as the solid support derivatized linker, such that cleavage of the solid support derivatized linker and the cleavable linker of (a) takes place concomitantly. In another embodiment, the chemical moiety of (b) that can be used to isolate the attached oligonucleotide sequence comprises a trityl group, for example a dimethoxytrityl group, which can be employed in a trityl-on synthesis strategy as described herein. In yet another embodiment, the chemical moiety, such as a dimethoxytrityl group, is removed during purification, for example, using acidic conditions.

[0195] In a further embodiment, the method for siNA synthesis is a solution phase synthesis or hybrid phase synthesis wherein both strands of the siNA duplex are synthesized in tandem using a cleavable linker attached to the first sequence which acts a scaffold for synthesis of the second sequence. Cleavage of the linker under conditions suitable for hybridization of the separate siNA sequence strands results in formation of the double-stranded siNA molecule.

[0196] In another embodiment, the invention features a method for synthesizing a siNA duplex molecule comprising: (a) synthesizing one oligonucleotide sequence strand of the siNA molecule, wherein the sequence comprises a cleavable linker molecule that can be used as a scaffold for the synthesis of another oligonucleotide sequence; (b) synthesizing a second oligonucleotide sequence having complementarity to the first sequence strand on the scaffold of (a), wherein the second sequence comprises the other strand of the double-stranded siNA molecule and wherein the second sequence further comprises a chemical moiety than can be used to isolate the attached oligonucleotide sequence; (c) purifying the product of (b) utilizing the chemical moiety of the second oligonucleotide sequence strand under conditions suitable for isolating the full-length sequence comprising both siNA oligonucleotide strands connected by the cleavable linker and under conditions suitable for the two siNA oligonucleotide strands to hybridize and form a stable duplex. In one embodiment, cleavage of the linker molecule in (c) above takes place during deprotection of the oligonucleotide, for example under hydrolysis conditions. In another embodiment, cleavage of the linker molecule in (c) above takes place after deprotection of the oligonucleotide. In another embodiment, the method of synthesis comprises solid phase synthesis on a solid support such as controlled pore glass (CPG) or polystyrene, wherein the first sequence of (a) is synthesized on a cleavable linker, such as a succinyl linker, using the solid support as a scaffold. The cleavable linker in (a) used as a scaffold for synthesizing the second strand can comprise similar reactivity or differing reactivity as the solid support derivatized linker, such that cleavage of the solid support derivatized linker and the cleavable linker of (a) takes place either concomitantly or sequentially. In one embodiment, the chemical moiety of (b) that can be used to isolate the attached oligonucleotide sequence comprises a trityl group, for example a dimethoxytrityl group.

[0197] In another embodiment, the invention features a method for making a double-stranded siNA molecule in a single synthetic process comprising: (a) synthesizing an oligonucleotide having a first and a second sequence, wherein the first sequence is complementary to the second sequence, and the first oligonucleotide sequence is linked to the second sequence via a cleavable linker, and wherein a terminal 5′-protecting group, for example, a 5′-O-dimethoxytrityl group (5′-O-DMT) remains on the oligonucleotide having the second sequence; (b) deprotecting the oligonucleotide whereby the deprotection results in the cleavage of the linker joining the two oligonucleotide sequences; and (c) purifying the product of (b) under conditions suitable for isolating the double-stranded siNA molecule, for example using a trityl-on synthesis strategy as described herein.

[0198] In another embodiment, the method of synthesis of siNA molecules of the invention comprises the teachings of Scaringe et al., U.S. Pat. Nos. 5,889,136; 6,008,400; and 6,111,086, incorporated by reference herein in their entirety.

[0199] In one embodiment, the invention features siNA constructs that mediate RNAi in a cell or reconstituted system, wherein the siNA construct comprises one or more chemical modifications, for example, one or more chemical modifications having any of Formulae I-VII or any combination thereof that increases the nuclease resistance of the siNA construct.

[0200] In another embodiment, the invention features a method for generating siNA molecules with increased nuclease resistance comprising (a) introducing nucleotides having any of Formula I-VII or any combination thereof into a siNA molecule, and (b) assaying the siNA molecule of step (a) under conditions suitable for isolating siNA molecules having increased nuclease resistance.

[0201] In one embodiment, the invention features siNA constructs that mediate RNAi against a target gene, wherein the siNA construct comprises one or more chemical modifications described herein that modulates the binding affinity between the sense and antisense strands of the siNA construct.

[0202] In one embodiment, the binding affinity between the sense and antisense strands of the siNA construct is modulated to increase the activity of the siNA molecule with regard to the ability of the siNA to mediate RNA interference. In another embodiment the binding affinity between the sense and antisense strands of the siNA construct is decreased. The binding affinity between the sense and antisense strands of the siNA construct can be decreased by introducing one or more chemically modified nucleotides in the siNA sequence that disrupts the duplex stability of the siNA (e.g., lowers the Tm of the duplex). The binding affinity between the sense and antisense strands of the siNA construct can be decreased by introducing one or more nucleotides in the siNA sequence that do not form Watson-Crick base pairs. The binding affinity between the sense and antisense strands of the siNA construct can be decreased by introducing one or more wobble base pairs in the siNA sequence. The binding affinity between the sense and antisense strands of the siNA construct can be decreased by modifying the nucleobase composition of the siNA, such as by altering the G-C content of the siNA sequence (e.g., decreasing the number of G-C base pairs in the siNA sequence). These modifications and alterations in sequence can be introduced selectively at pre-determined positions of the siNA sequence to increase siNA mediated RNAi activity. For example, such modifications and sequence alterations can be introduced to disrupt siNA duplex stability between the 5′-end of the antisense strand and the 3′-end of the sense strand, the 3′-end of the antisense strand and the 5′-end of the sense strand, or alternately the middle of the siNA duplex. In another embodiment, siNA molecules are screened for optimized RNAi activity by introducing such modifications and sequence alterations either by rational design based upon observed rules or trends in increasing siNA activity, or randomly via combinatorial selection processes that cover either partial or complete sequence space of the siNA construct.

[0203] In another embodiment, the invention features a method for generating siNA molecules with increased binding affinity between the sense and antisense strands of the siNA molecule comprising (a) introducing nucleotides having any of Formula I-VII or any combination thereof into a siNA molecule, and (b) assaying the siNA molecule of step (a) under conditions suitable for isolating siNA molecules having increased binding affinity between the sense and antisense strands of the siNA molecule.

[0204] In another embodiment, the invention features a method for generating siNA molecules with decreased binding affinity between the sense and antisense strands of the siNA molecule comprising (a) introducing nucleotides having any of Formula I-VII or any combination thereof into a siNA molecule, and (b) assaying the siNA molecule of step (a) under conditions suitable for isolating siNA molecules having decreased binding affinity between the sense and antisense strands of the siNA molecule.

[0205] In one embodiment, the invention features siNA constructs that mediate RNAi in a cell or reconstituted system, wherein the siNA construct comprises one or more chemical modifications described herein that modulates the binding affinity between the antisense strand of the siNA construct and a complementary target RNA sequence within a cell.

[0206] In one embodiment, the invention features siNA constructs that mediate RNAi in a cell or reconstituted system, wherein the siNA construct comprises one or more chemical modifications described herein that modulates the binding affinity between the antisense strand of the siNA construct and a complementary target DNA sequence within a cell.

[0207] In another embodiment, the invention features a method for generating siNA molecules with increased binding affinity between the antisense strand of the siNA molecule and a complementary target RNA sequence comprising (a) introducing nucleotides having any of Formula I-VII or any combination thereof into a siNA molecule, and (b) assaying the siNA molecule of step (a) under conditions suitable for isolating siNA molecules having increased binding affinity between the antisense strand of the siNA molecule and a complementary target RNA sequence.

[0208] In another embodiment, the invention features a method for generating siNA molecules with increased binding affinity between the antisense strand of the siNA molecule and a complementary target DNA sequence comprising (a) introducing nucleotides having any of Formula I-VII or any combination thereof into a siNA molecule, and (b) assaying the siNA molecule of step (a) under conditions suitable for isolating siNA molecules having increased binding affinity between the antisense strand of the siNA molecule and a complementary target DNA sequence.

[0209] In another embodiment, the invention features a method for generating siNA molecules with decreased binding affinity between the antisense strand of the siNA molecule and a complementary target RNA sequence comprising (a) introducing nucleotides having any of Formula I-VII or any combination thereof into a siNA molecule, and (b) assaying the siNA molecule of step (a) under conditions suitable for isolating siNA molecules having decreased binding affinity between the antisense strand of the siNA molecule and a complementary target RNA sequence.

[0210] In another embodiment, the invention features a method for generating siNA molecules with decreased binding affinity between the antisense strand of the siNA molecule and a complementary target DNA sequence comprising (a) introducing nucleotides having any of Formula I-VII or any combination thereof into a siNA molecule, and (b) assaying the siNA molecule of step (a) under conditions suitable for isolating siNA molecules having decreased binding affinity between the antisense strand of the siNA molecule and a complementary target DNA sequence.

[0211] In one embodiment, the invention features siNA constructs that mediate RNAi in a cell or reconstituted system, wherein the siNA construct comprises one or more chemical modifications described herein that modulate the polymerase activity of a cellular polymerase capable of generating additional endogenous siNA molecules having sequence homology to the chemically-modified siNA construct.

[0212] In another embodiment, the invention features a method for generating siNA molecules capable of mediating increased polymerase activity of a cellular polymerase capable of generating additional endogenous siNA molecules having sequence homology to a chemically-modified siNA molecule comprising (a) introducing nucleotides having any of Formula I-VII or any combination thereof into a siNA molecule, and (b) assaying the siNA molecule of step (a) under conditions suitable for isolating siNA molecules capable of mediating increased polymerase activity of a cellular polymerase capable of generating additional endogenous siNA molecules having sequence homology to the chemically-modified siNA molecule. In one embodiment, the invention features chemically-modified siNA constructs that mediate RNAi in a cell or reconstituted system, wherein the chemical modifications do not significantly effect the interaction of siNA with a target RNA molecule, DNA molecule and/or proteins or other factors that are essential for RNAi in a manner that would decrease the efficacy of RNAi mediated by such siNA constructs.

[0213] In another embodiment, the invention features a method for generating siNA molecules with improved RNAi activity comprising (a) introducing nucleotides having any of Formula I-VII or any combination thereof into a siNA molecule, and (b) assaying the siNA molecule of step (a) under conditions suitable for isolating siNA molecules having improved RNAi activity.

[0214] In yet another embodiment, the invention features a method for generating siNA molecules with improved RNAi activity against a target RNA comprising (a) introducing nucleotides having any of Formula I-VII or any combination thereof into a siNA molecule, and (b) assaying the siNA molecule of step (a) under conditions suitable for isolating siNA molecules having improved RNAi activity against the target RNA.

[0215] In yet another embodiment, the invention features a method for generating siNA molecules with improved RNAi activity against a DNA target comprising (a) introducing nucleotides having any of Formula I-VII or any combination thereof into a siNA molecule, and (b) assaying the siNA molecule of step (a) under conditions suitable for isolating siNA molecules having improved RNAi activity against the DNA target, such as a gene, chromosome, or portion thereof.

[0216] In one embodiment, the invention features siNA constructs that mediate RNAi in a cell or reconstituted system, wherein the siNA construct comprises one or more chemical modifications described herein that modulates the cellular uptake of the siNA construct.

[0217] In another embodiment, the invention features a method for generating siNA molecules against a target gene with improved cellular uptake comprising (a) introducing nucleotides having any of Formula I-VII or any combination thereof into a siNA molecule, and (b) assaying the siNA molecule of step (a) under conditions suitable for isolating siNA molecules having improved cellular uptake.

[0218] In one embodiment, the invention features siNA constructs that mediate RNAi against a target gene, wherein the siNA construct comprises one or more chemical modifications described herein that increases the bioavailability of the siNA construct, for example, by attaching polymeric conjugates such as polyethyleneglycol or equivalent conjugates that improve the pharmacokinetics of the siNA construct, or by attaching conjugates that target specific tissue types or cell types in vivo. Non-limiting examples of such conjugates are described in Vargeese et al., U.S. Ser. No. 10/201,394 incorporated by reference herein.

[0219] In one embodiment, the invention features a method for generating siNA molecules of the invention with improved bioavailability comprising (a) introducing a conjugate into the structure of a siNA molecule, and (b) assaying the siNA molecule of step (a) under conditions suitable for isolating siNA molecules having improved bioavailability. Such conjugates can include ligands for cellular receptors, such as peptides derived from naturally occurring protein ligands; protein localization sequences, including cellular ZIP code sequences; antibodies; nucleic acid aptamers; vitamins and other co-factors, such as folate and N-acetylgalactosamine; polymers, such as polyethyleneglycol (PEG); phospholipids; cholesterol; polyamines, such as spermine or spermidine; and others.

[0220] In one embodiment, the invention features a double stranded short interfering nucleic acid (siNA) molecule that comprises a first nucleotide sequence complementary to a target RNA sequence or a portion thereof, and a second sequence having complementarity to said first sequence, wherein said second sequence is chemically modified in a manner that it can no longer act as a guide sequence for efficiently mediating RNA interference and/or is recognized by cellular proteins that facilitate RNAi.

[0221] In one embodiment, the invention features a double stranded short interfering nucleic acid (siNA) molecule that comprises a first nucleotide sequence complementary to a target RNA sequence or a portion thereof, and a second sequence having complementarity to said first sequence, wherein the second sequence is designed or modified in a manner that prevents its entry into the RNAi pathway as a guide sequence or as a sequence that is complementary to a target nucleic acid (e.g., RNA) sequence. Such design or modifications are expected to enhance the activity of siNA and/or improve the specificity of siNA molecules of the invention. These modifications are also expected to minimize any off-target effects and/or associated toxicity.

[0222] In one embodiment, the invention features a double stranded short interfering nucleic acid (siNA) molecule that comprises a first nucleotide sequence complementary to a target RNA sequence or a portion thereof, and a second sequence having complementarity to said first sequence, wherein said second sequence is incapable of acting as a guide sequence for mediating RNA interference.

[0223] In one embodiment, the invention features a double stranded short interfering nucleic acid (siNA) molecule that comprises a first nucleotide sequence complementary to a target RNA sequence or a portion thereof, and a second sequence having complementarity to said first sequence, wherein said second sequence does not have a terminal 5′-hydroxyl (5′-OH) or 5′-phosphate group.

[0224] In one embodiment, the invention features a double stranded short interfering nucleic acid (siNA) molecule that comprises a first nucleotide sequence complementary to a target RNA sequence or a portion thereof, and a second sequence having complementarity to said first sequence, wherein said second sequence comprises a terminal cap moiety at the 5′-end of said second sequence. In another embodiment, the terminal cap moiety comprises an inverted abasic, inverted deoxy abasic, inverted nucleotide moiety, a group shown in FIG. 22, an alkyl or cycloalkyl group, a heterocycle, or any other group that prevents RNAi activity in which the second sequence serves as a guide sequence or template for RNAi.

[0225] In one embodiment, the invention features a double stranded short interfering nucleic acid (siNA) molecule that comprises a first nucleotide sequence complementary to a target RNA sequence or a portion thereof, and a second sequence having complementarity to said first sequence, wherein said second sequence comprises a terminal cap moiety at the 5′-end and 3′-end of said second sequence. In another embodiment, each terminal cap moiety individually comprises an inverted abasic, inverted deoxy abasic, inverted nucleotide moiety, a group shown in FIG. 22, an alkyl or cycloalkyl group, a heterocycle, or any other group that prevents RNAi activity in which the second sequence serves as a guide sequence or template for RNAi.

[0226] In one embodiment, the invention features a method for generating siNA molecules of the invention with improved specificity for down regulating or inhibiting the expression of a target nucleic acid (e.g., a DNA or RNA such as a gene or its corresponding RNA), comprising (a) introducing one or more chemical modifications into the structure of a siNA molecule, and (b) assaying the siNA molecule of step (a) under conditions suitable for isolating siNA molecules having improved specificity. In another embodiment, the chemical modification used to improve specificity comprises terminal cap modifications at the 5′-end, 3′-end, or both 5′ and 3′-ends of the siNA molecule. The terminal cap modifications can comprise, for example, structures shown in FIG. 22 (e.g., inverted deoxyabasic moieties) or any other chemical modification that renders a portion of the siNA molecule (e.g., the sense strand) incapable of mediating RNA interference against an off target nucleic acid sequence. In a non-limiting example, a siNA molecule is designed such that only the antisense sequence of the siNA molecule can serve as a guide sequence for RISC mediated degradation of a corresponding target RNA sequence. This can be accomplished by rendering the sense sequence of the siNA inactive by introducing chemical modifications to the sense strand that preclude recognition of the sense strand as a guide sequence by RNAi machinery. In one embodiment, such chemical modifications comprise any chemical group at the 5′-end of the sense strand of the siNA, or any other group that serves to render the sense strand inactive as a guide sequence for mediating RNA interference. These modifications, for example, can result in a molecule where the 5′-end of the sense strand no longer has a free 5′-hydroxyl (5′-OH) or a free 5′-phosphate group (e.g., phosphate, diphosphate, triphosphate, cyclic phosphate etc.). Non-limiting examples of such siNA constructs are described herein, such as “Stab 9/10”, “Stab 7/8”, “Stab 7/19”, “Stab 17/22”, “Stab 23/24”, and “Stab 23/25” chemistries (Table IV) and variants thereof wherein the 5′-end and 3′-end of the sense strand of the siNA do not comprise a hydroxyl group or phosphate group.

[0227] In one embodiment, the invention features a method for generating siNA molecules of the invention with improved specificity for down regulating or inhibiting the expression of a target nucleic acid (e.g., a DNA or RNA such as a gene or its corresponding RNA), comprising introducing one or more chemical modifications into the structure of a siNA molecule that prevent a strand or portion of the siNA molecule from acting as a template or guide sequence for RNAi activity. In one embodiment, the inactive strand or sense region of the siNA molecule is the sense strand or sense region of the siNA molecule, i.e. the strand or region of the siNA that does not have complementarity to the target nucleic acid sequence. In one embodiment, such chemical modifications comprise any chemical group at the 5′-end of the sense strand or region of the siNA that does not comprise a 5′-hydroxyl (5′-OH) or 5′-phosphate group, or any other group that serves to render the sense strand or sense region inactive as a guide sequence for mediating RNA interference. Non-limiting examples of such siNA constructs are described herein, such as “Stab 9/10”, “Stab 7/8”, “Stab 7/19”, “Stab 17/22”, “Stab 23/24”, and “Stab 23/25” chemistries (Table IV) and variants thereof wherein the 5′-end and 3′-end of the sense strand of the siNA do not comprise a hydroxyl group or phosphate group.

[0228] In one embodiment, the invention features a method for screening siNA molecules against a target nucleic acid sequence comprising, (a) generating a plurality of unmodified siNA molecules, (b) assaying the siNA molecules of step (a) under conditions suitable for isolating siNA molecules that are active in mediating RNA interference against the target nucleic acid sequence, (c) introducing chemical modifications (e.g., chemical modifications as described herein or as otherwise known in the art) into the active siNA molecules of (b), and (d) optionally re-screening the chemically modified siNA molecules of (c) under conditions suitable for isolating chemically modified siNA molecules that are active in mediating RNA interference against the target nucleic acid sequence.

[0229] In one embodiment, the invention features a method for screening siNA molecules against a target nucleic acid sequence comprising, (a) generating a plurality of chemically modified siNA molecules (e.g., siNA molecules as described herein or as otherwise known in the art), and (b) assaying the siNA molecules of step (a) under conditions suitable for isolating chemically modified siNA molecules that are active in mediating RNA interference against the target nucleic acid sequence.

[0230] In another embodiment, the invention features a method for generating siNA molecules of the invention with improved bioavailability comprising (a) introducing an excipient formulation to a siNA molecule, and (b) assaying the siNA molecule of step (a) under conditions suitable for isolating siNA molecules having improved bioavailability. Such excipients include polymers such as cyclodextrins, lipids, cationic lipids, polyamines, phospholipids, nanoparticles, receptors, ligands, and others.

[0231] In another embodiment, the invention features a method for generating siNA molecules of the invention with improved bioavailability comprising (a) introducing an excipient formulation to a siNA molecule, and (b) assaying the siNA molecule of step (a) under conditions suitable for isolating siNA molecules having improved bioavailability. Such excipients include polymers such as cyclodextrins, lipids, cationic lipids, polyamines, phospholipids, and others.

[0232] In another embodiment, the invention features a method for generating siNA molecules of the invention with improved bioavailability comprising (a) introducing nucleotides having any of Formulae I-VII or any combination thereof into a siNA molecule, and (b) assaying the siNA molecule of step (a) under conditions suitable for isolating siNA molecules having improved bioavailability.

[0233] In another embodiment, polyethylene glycol (PEG) can be covalently attached to siNA compounds of the present invention. The attached PEG can be any molecular weight, preferably from about 2,000 to about 50,000 daltons (Da).

[0234] The present invention can be used alone or as a component of a kit having at least one of the reagents necessary to carry out the in vitro or in vivo introduction of RNA to test samples and/or subjects. For example, preferred components of the kit include a siNA molecule of the invention and a vehicle that promotes introduction of the siNA into cells of interest as described herein (e.g., using lipids and other methods of transfection known in the art, see for example Beigelman et al, U.S. Pat. No. 6,395,713). The kit can be used for target validation, such as in determining gene function and/or activity, or in drug optimization, and in drug discovery (see for example Usman et al., U.S. Ser. No. 60/402,996). Such a kit can also include instructions to allow a user of the kit to practice the invention.

[0235] The term “short interfering nucleic acid”, “siNA”, “short interfering RNA”, “siRNA”, “short interfering nucleic acid molecule”, “short interfering oligonucleotide molecule”, or “chemically-modified short interfering nucleic acid molecule” as used herein refers to any nucleic acid molecule capable of inhibiting or down regulating gene expression or viral replication, for example by mediating RNA interference “RNAi” or gene silencing in a sequence-specific manner; see for example Zamore et al., 2000, Cell, 101, 25-33; Bass, 2001, Nature, 411, 428-429; Elbashir et al., 2001, Nature, 411, 494-498; and Kreutzer et al., International PCT Publication No. WO 00/44895; Zernicka-Goetz et al., International PCT Publication No. WO 01/36646; Fire, International PCT Publication No. WO 99/32619; Plaetinck et al., International PCT Publication No. WO 00/01846; Mello and Fire, International PCT Publication No. WO 01/29058; Deschamps-Depaillette, International PCT Publication No. WO 99/07409; and Li et al., International PCT Publication No. WO 00/44914; Allshire, 2002, Science, 297, 1818-1819; Volpe et al., 2002, Science, 297, 1833-1837; Jenuwein, 2002, Science, 297, 2215-2218; and Hall et al., 2002, Science, 297, 2232-2237; Hutvagner and Zamore, 2002, Science, 297, 2056-60; McManus et al., 2002, RNA, 8, 842-850; Reinhart et al., 2002, Gene & Dev., 16, 1616-1626; and Reinhart & Bartel, 2002, Science, 297, 1831). Non limiting examples of siNA molecules of the invention are shown in FIGS. 18-20, and Table I herein. For example the siNA can be a double-stranded polynucleotide molecule comprising self-complementary sense and antisense regions, wherein the antisense region comprises nucleotide sequence that is complementary to nucleotide sequence in a target nucleic acid molecule or a portion thereof and the sense region having nucleotide sequence corresponding to the target nucleic acid sequence or a portion thereof. The siNA can be assembled from two separate oligonucleotides, where one strand is the sense strand and the other is the antisense strand, wherein the antisense and sense strands are self-complementary (i.e. each strand comprises nucleotide sequence that is complementary to nucleotide sequence in the other strand; such as where the antisense strand and sense strand form a duplex or double stranded structure, for example wherein the double stranded region is about 19 base pairs); the antisense strand comprises nucleotide sequence that is complementary to nucleotide sequence in a target nucleic acid molecule or a portion thereof and the sense strand comprises nucleotide sequence corresponding to the target nucleic acid sequence or a portion thereof. Alternatively, the siNA is assembled from a single oligonucleotide, where the self-complementary sense and antisense regions of the siNA are linked by means of a nucleic acid based or non-nucleic acid-based linker(s). The siNA can be a polynucleotide with a duplex, asymmetric duplex, hairpin or asymmetric hairpin secondary structure, having self-complementary sense and antisense regions, wherein the antisense region comprises nucleotide sequence that is complementary to nucleotide sequence in a separate target nucleic acid molecule or a portion thereof and the sense region having nucleotide sequence corresponding to the target nucleic acid sequence or a portion thereof. The siNA can be a circular single-stranded polynucleotide having two or more loop structures and a stem comprising self-complementary sense and antisense regions, wherein the antisense region comprises nucleotide sequence that is complementary to nucleotide sequence in a target nucleic acid molecule or a portion thereof and the sense region having nucleotide sequence corresponding to the target nucleic acid sequence or a portion thereof, and wherein the circular polynucleotide can be processed either in vivo or in vitro to generate an active siNA molecule capable of mediating RNAi. The siNA can also comprise a single stranded polynucleotide having nucleotide sequence complementary to nucleotide sequence in a target nucleic acid molecule or a portion thereof (for example, where such siNA molecule does not require the presence within the siNA molecule of nucleotide sequence corresponding to the target nucleic acid sequence or a portion thereof), wherein the single stranded polynucleotide can further comprise a terminal phosphate group, such as a 5′-phosphate (see for example Martinez et al., 2002, Cell., 110, 563-574 and Schwarz et al., 2002, Molecular Cell, 10, 537-568), or 5′,3′-diphosphate. In certain embodiment, the siNA molecule of the invention comprises separate sense and antisense sequences or regions, wherein the sense and antisense regions are covalently linked by nucleotide or non-nucleotide linkers molecules as is known in the art, or are alternately non-covalently linked by ionic interactions, hydrogen bonding, van der waals interactions, hydrophobic intercations, and/or stacking interactions. In certain embodiments, the siNA molecules of the invention comprise nucleotide sequence that is complementary to nucleotide sequence of a target gene. In another embodiment, the siNA molecule of the invention interacts with nucleotide sequence of a target gene in a manner that causes inhibition of expression of the target gene. As used herein, siNA molecules need not be limited to those molecules containing only RNA, but further encompasses chemically-modified nucleotides and non-nucleotides. In certain embodiments, the short interfering nucleic acid molecules of the invention lack 2′-hydroxy (2′-OH) containing nucleotides. Applicant describes in certain embodiments short interfering nucleic acids that do not require the presence of nucleotides having a 2′-hydroxy group for mediating RNAi and as such, short interfering nucleic acid molecules of the invention optionally do not include any ribonucleotides (e.g., nucleotides having a 2′-OH group). Such siNA molecules that do not require the presence of ribonucleotides within the siNA molecule to support RNAi can however have an attached linker or linkers or other attached or associated groups, moieties, or chains containing one or more nucleotides with 2′-OH groups. Optionally, siNA molecules can comprise ribonucleotides at about 5, 10, 20, 30, 40, or 50% of the nucleotide positions. The modified short interfering nucleic acid molecules of the invention can also be referred to as short-interfering modified oligonucleotides “siMON.” As used herein, the term siNA is meant to be equivalent to other terms used to describe nucleic acid molecules that are capable of mediating sequence specific RNAi, for example short interfering RNA (siRNA), double-stranded RNA (dsRNA), micro-RNA (miRNA), short hairpin RNA (shRNA), short interfering oligonucleotide, short interfering nucleic acid, short interfering modified oligonucleotide, chemically-modified siRNA, post-transcriptional gene silencing RNA (ptgsRNA), and others. In addition, as used herein, the term RNAi is meant to be equivalent to other terms used to describe sequence specific RNA interference, such as post transcriptional gene silencing, translational inhibition, or epigenetics. For example, siNA molecules of the invention can be used to epigenetically silence genes at both the post-transcriptional level or the pre-transcriptional level. In a non-limiting example, epigenetic regulation of gene expression by siNA molecules of the invention can result from siNA mediated modification of chromatin structure to alter gene expression (see, for example, Verdel et al., 2004, Science, 303, 672-676; Pal-Bhadra et al., 2004, Science, 303, 669-672; Allshire, 2002, Science, 297, 1818-1819; Volpe et al., 2002, Science, 297, 1833-1837; Jenuwein, 2002, Science, 297, 2215-2218; and Hall et al, 2002, Science, 297, 2232-2237).

[0236] In one embodiment, a siNA molecule of the invention is a duplex forming oligonucleotide “DFO”, (see for example FIGS. 93-94 and Vaish et al., U.S. Ser. No. 10/727,780 filed Dec. 3, 2003).

[0237] In one embodiment, a siNA molecule of the invention is a multifunctional siNA, or a multi-targeted (see for example FIGS. 95-101 and Jadhati et al., U.S. Ser. No. 60/543,480 filed Feb. 10, 2004). The multifunctional siNA of the invention can comprise nucleotide sequence to targeting, for example, two regions of a target RNA or nucleotide sequences in two distinct target RNAs (see for example target sequences in Table 1).

[0238] By “asymmetric hairpin” as used herein is meant a linear siNA molecule comprising an antisense region, a loop portion that can comprise nucleotides or non-nucleotides, and a sense region that comprises fewer nucleotides than the antisense region to the extent that the sense region has enough complimentary nucleotides to base pair with the antisense region and form a duplex with loop. For example, an asymmetric hairpin siNA molecule of the invention can comprise an antisense region having length sufficient to mediate RNAi in a cell or in vitro system (e.g., about 19 to about 22 nucleotides) and a loop region comprising about 4 to about 8 nucleotides, and a sense region having about 3 to about 18 nucleotides that are complementary to the antisense region (see for example FIG. 74). The asymmetric hairpin siNA molecule can also comprise a 5′-terminal phosphate group that can be chemically modified (for example as shown in FIG. 75). The loop portion of the asymmetric hairpin siNA molecule can comprise nucleotides, non-nucleotides, linker molecules, or conjugate molecules as described herein.

[0239] By “asymmetric duplex” as used herein is meant a siNA molecule having two separate strands comprising a sense region and an antisense region, wherein the sense region comprises fewer nucleotides than the antisense region to the extent that the sense region has enough complimentary nucleotides to base pair with the antisense region and form a duplex. For example, an asymmetric duplex siNA molecule of the invention can comprise an antisense region having length sufficient to mediate RNAi in a cell or in vitro system (e.g., about 19 to about 22 nucleotides) and a sense region having about 3 to about 18 nucleotides that are complementary to the antisense region (see for example FIG. 74).

[0240] By “modulate” is meant that the expression of the gene, or level of RNA molecule or equivalent RNA molecules encoding one or more proteins or protein subunits, or activity of one or more proteins or protein subunits is up regulated or down regulated, such that expression, level, or activity is greater than or less than that observed in the absence of the modulator. For example, the term “modulate” can mean “inhibit,” but the use of the word “modulate” is not limited to this definition.

[0241] By “inhibit”, “down-regulate”, or “reduce”, it is meant that the expression of the gene, or level of RNA molecules or equivalent RNA molecules encoding one or more proteins or protein subunits, or activity of one or more proteins or protein subunits, is reduced below that observed in the absence of the nucleic acid molecules (e.g., siNA) of the invention. In one embodiment, inhibition, down-regulation or reduction with an siNA molecule is below that level observed in the presence of an inactive or attenuated molecule. In another embodiment, inhibition, down-regulation, or reduction with siNA molecules is below that level observed in the presence of, for example, an siNA molecule with scrambled sequence or with mismatches. In another embodiment, inhibition, down-regulation, or reduction of gene expression with a nucleic acid molecule of the instant invention is greater in the presence of the nucleic acid molecule than in its absence.

[0242] By “palindrome” or “repeat” nucleic acid sequence is meant a nucleic acid sequence whose 5′-to-3′ sequence is identical to its complementary sequence in a duplex. For example, a palindrome sequence of the invention in a duplex can comprise sequence having the same sequence when one strand of the duplex is read in the 5′-to-3′ direction (left to right) and the sequence other strand based paired to it is read in the 3′- to 5′ direction (right to left). In another example, a repeat sequence of the invention can comprise a sequence having repeated nucleotides so arranged as to provide self complementarity when the sequence self-hybridizes (e.g., 5′-AUAU . . . -3′; 5′-AAUU . . . -3′; 5′-UAUA . . . -3′; 5′-UUAA . . . -3′; 5′-CGCG . . . -3′; 5′-CCGG . . . -3′,5′-GGCC . . . -3′; 5′-CCGG . . . -3′; or any expanded repeat thereof etc.). The palindrome or repeat sequence can comprise about 2 to about 24 nucleotides in even numbers, (e.g., 2, 4, 6, 8, 10, 12, 14, 16, 18, 20, 22, or 24 nucleotides). All that is required of the palindrome or repeat sequence is that it comprises nucleic acid sequence whose 5′-to-3′ sequence is identical when present in a duplex, either alone or as part of a longer nucleic acid sequence. The palindrome or repeat sequence of the invention can comprise chemical modifications as described herein that can form, for example, Watson Crick or non-Watson Crick base pairs.

[0243] By “gene”, or “target gene”, is meant, a nucleic acid that encodes an RNA, for example, nucleic acid sequences including, but not limited to, structural genes encoding a polypeptide. A gene or target gene can also encode a functional RNA (fRNA) or non-coding RNA (ncRNA), such as small temporal RNA (stRNA), micro RNA (miRNA), small nuclear RNA (snRNA), short interfering RNA (siRNA), small nucleolar RNA (snRNA), ribosomal RNA (rRNA), transfer RNA (tRNA) and precursor RNAs thereof. Such non-coding RNAs can serve as target nucleic acid molecules for siNA mediated RNA interference in modulating the activity of fRNA or ncRNA involved in functional or regulatory cellular processes. Abberant fRNA or ncRNA activity leading to disease can therefore be modulated by siNA molecules of the invention. siNA molecules targeting fRNA and ncRNA can also be used to manipulate or alter the genotype or phenotype of an organism or cell, by intervening in cellular processes such as genetic imprinting, transcription, translation, or nucleic acid processing (e.g., transamination, methylation etc.). The target gene can be a gene derived from a cell, an endogenous gene, a transgene, or exogenous genes such as genes of a pathogen, for example a virus, which is present in the cell after infection thereof. The cell containing the target gene can be derived from or contained in any organism, for example a plant, animal, protozoan, virus, bacterium, or fungus. Non-limiting examples of plants include monocots, dicots, or gymnosperms. Non-limiting examples of animals include vertebrates or invertebrates. Non-limiting examples of fungi include molds or yeasts.

[0244] By “non-canonical base pair” is meant any non-Watson Crick base pair, such as mismatches and/or wobble base pairs, including flipped mismatches, single hydrogen bond mismatches, trans-type mismatches, triple base interactions, and quadruple base interactions. Non-limiting examples of such non-canonical base pairs include, but are not limited to, AC reverse Hoogsteen, AC wobble, AU reverse Hoogsteen, GU wobble, AA N7 amino, CC 2-carbonyl-amino(H1)-N3-amino(H2), GA sheared, UC 4-carbonyl-amino, UU imino-carbonyl, AC reverse wobble, AU Hoogsteen, AU reverse Watson Crick, CG reverse Watson Crick, GC N3-amino-amino N3, AA N1-amino symmetric, AA N7-amino symmetric, GA N7-N1 amino-carbonyl, GA+ carbonyl-amino N7-N1, GG N1-carbonyl symmetric, GG N3-amino symmetric, CC carbonyl-amino symmetric, CC N3-amino symmetric, UU 2-carbonyl-imino symmetric, UU 4-carbonyl-imino symmetric, AA amino-N3, AA N1-amino, AC amino 2-carbonyl, AC N3-amino, AC N7-amino, AU amino-4-carbonyl, AU N1-imino, AU N3-imino, AU N7-imino, CC carbonyl-amino, GA amino-N1, GA amino-N7, GA carbonyl-amino, GA N3-amino, GC amino-N3, GC carbonyl-amino, GC N3-amino, GC N7-amino, GG amino-N7, GG carbonyl-imino, GG N7-amino, GU amino-2-carbonyl, GU carbonyl-imino, GU imino-2-carbonyl, GU N7-imino, psiU imino-2-carbonyl, UC 4-carbonyl-amino, UC imino-carbonyl, UU imino-4-carbonyl, AC C2-H—N3, GA carbonyl-C2-H, UU imino-4-carbonyl 2 carbonyl-C5-H, AC amino(A) N3(C)-carbonyl, GC imino amino-carbonyl, Gpsi imino-2-carbonyl amino-2-carbonyl, and GU imino amino-2-carbonyl base pairs.

[0245] By “homologous sequence” is meant, a nucleotide sequence that is shared by one or more polynucleotide sequences, such as genes, gene transcripts and/or non-coding polynucleotides. For example, a homologous sequence can be a nucleotide sequence that is shared by two or more genes encoding related but different proteins, such as different members of a gene family (e.g., VEGF receptors such as VEGFr1, VEGFr2, and/or VEGFr3), different protein epitopes (e.g., different viral strains), different protein isoforms (e.g., VEGF A, B, C, and/or D) or completely divergent genes, such as a cytokine and its corresponding receptors (e.g., VEGF and VEGF receptors). A homologous sequence can be a nucleotide sequence that is shared by two or more non-coding polynucleotides, such as noncoding DNA or RNA, regulatory sequences, introns, and sites of transcriptional control or regulation. Homologous sequences can also include conserved sequence regions shared by more than one polynucleotide sequence. The homology does not need to be perfect homology (e.g., 100%), as partially homologous sequences are also contemplated by the instant invention (e.g., 99%, 98%, 97%, 96%, 95%, 94%, 93%, 92%, 91%, 90%, 89%, 88%, 87%, 86%, 85%, 84%, 83%, 82%, 81%, 80% etc.).

[0246] By “conserved sequence region” is meant, a nucleotide sequence of one or more regions in a polynucleotide that does not vary significantly between generations or from one biological system or organism to another biological system or organism. The polynucleotide can include both coding and non-coding DNA and RNA.

[0247] By “cancer” is meant a group of diseases characterized by uncontrolled growth and spread of abnormal cells.

[0248] By “sense region” is meant a nucleotide sequence of a siNA molecule having complementarity to an antisense region of the siNA molecule. In addition, the sense region of a siNA molecule can comprise a nucleic acid sequence having homology with a target nucleic acid sequence.

[0249] By “antisense region” is meant a nucleotide sequence of a siNA molecule having complementarity to a target nucleic acid sequence. In addition, the antisense region of a siNA molecule can optionally comprise a nucleic acid sequence having complementarity to a sense region of the siNA molecule.

[0250] By “target nucleic acid” is meant any nucleic acid sequence whose expression or activity is to be modulated. The target nucleic acid can be DNA “target DNA” or RNA “target RNA”, such as endogenous DNA or RNA, viral DNA or viral RNA, or other RNA encoded by a gene, virus, bacteria, fungus, mammal, or plant.

[0251] By “complementarity” is meant that a nucleic acid can form hydrogen bond(s) with another nucleic acid sequence by either traditional Watson-Crick or other non-traditional types. In reference to the nucleic molecules of the present invention, the binding free energy for a nucleic acid molecule with its complementary sequence is sufficient to allow the relevant function of the nucleic acid to proceed, e.g., RNAi activity. Determination of binding free energies for nucleic acid molecules is well known in the art (see, e.g., Turner et al., 1987, CSH Symp. Quant. Biol. LII pp. 123-133; Frier et al., 1986, Proc. Nat. Acad. Sci. USA 83:9373-9377; Turner et al., 1987, J. Am. Chem. Soc. 109:3783-3785). A percent complementarity indicates the percentage of contiguous residues in a nucleic acid molecule that can form hydrogen bonds (e.g., Watson-Crick base pairing) with a second nucleic acid sequence (e.g., 5, 6, 7, 8, 9, or 10 nucleotides out of a total of 10 nucleotides in the first oligonucleotide being based paired to a second nucleic acid sequence having 10 nucleotides represents 50%, 60%, 70%, 80%, 90%, and 100% complementary respectively). “Perfectly complementary” means that all the contiguous residues of a nucleic acid sequence will hydrogen bond with the same number of contiguous residues in a second nucleic acid sequence.

[0252] The siNA molecules of the invention represent a novel therapeutic approach to a broad spectrum of diseases and conditions, including cancer or cancerous disease, infectious disease, cardiovascular disease, neurologic disease, ocular disease, prion disease, inflammatory disease, autoimmune disease, pulmonary disease, renal disease, liver disease, mitochondrial disease, endocrine disease, reproduction related diseases and conditions as are known in the art, and any other indications that can respond to the level of an expressed gene product in a cell or organism (see for example McSwiggen, International PCT Publication No. WO 03/74654).

[0253] By “proliferative disease” or “cancer” as used herein is meant, any disease, condition, trait, genotype or phenotype characterized by unregulated cell growth or replication as is known in the art; including AIDS related cancers such as Kaposi's sarcoma; breast cancers; bone cancers such as Osteosarcoma, Chondrosarcomas, Ewing's sarcoma, Fibrosarcomas, Giant cell tumors, Adamantinomas, and Chordomas; Brain cancers such as Meningiomas, Glioblastomas, Lower-Grade Astrocytomas, Oligodendrocytomas, Pituitary Tumors, Schwannomas, and Metastatic brain cancers; cancers of the head and neck including various lymphomas such as mantle cell lymphoma, non-Hodgkins lymphoma, adenoma, squamous cell carcinoma, laryngeal carcinoma, gallbladder and bile duct cancers, cancers of the retina such as retinoblastoma, cancers of the esophagus, gastric cancers, multiple myeloma, ovarian cancer, uterine cancer, thyroid cancer, testicular cancer, endometrial cancer, melanoma, colorectal cancer, lung cancer, bladder cancer, prostate cancer, lung cancer (including non-small cell lung carcinoma), pancreatic cancer, sarcomas, Wilms' tumor, cervical cancer, head and neck cancer, skin cancers, nasopharyngeal carcinoma, liposarcoma, epithelial carcinoma, renal cell carcinoma, gallbladder adeno carcinoma, parotid adenocarcinoma, endometrial sarcoma, multidrug resistant cancers; and proliferative diseases and conditions, such as neovascularization associated with tumor angiogenesis, macular degeneration (e.g., wet/dry AMD), corneal neovascularization, diabetic retinopathy, neovascular glaucoma, myopic degeneration and other proliferative diseases and conditions such as restenosis and polycystic kidney disease, and any other cancer or proliferative disease, condition, trait, genotype or phenotype that can respond to the modulation of disease related gene expression in a cell or tissue, alone or in combination with other therapies.

[0254] By “inflammatory disease” or “inflammatory condition” as used herein is meant any disease, condition, trait, genotype or phenotype characterized by an inflammatory or allergic process as is known in the art, such as inflammation, acute inflammation, chronic inflammation, atherosclerosis, restenosis, asthma, allergic rhinitis, atopic dermatitis, septic shock, rheumatoid arthritis, inflammatory bowl disease, inflammatory pelvic disease, pain, ocular inflammatory disease, celiac disease, Leigh Syndrome, Glycerol Kinase Deficiency, Familial eosinophilia (FE), autosomal recessive spastic ataxia, laryngeal inflammatory disease; Tuberculosis, Chronic cholecystitis, Bronchiectasis, Silicosis and other pneumoconioses, and any other inflammatory disease, condition, trait, genotype or phenotype that can respond to the modulation of disease related gene expression in a cell or tissue, alone or in combination with other therapies.

[0255] By “autoimmune disease” or “autoimmune condition” as used herein is meant, any disease, condition, trait, genotype or phenotype characterized by autoimmunity as is known in the art, such as multiple sclerosis, diabetes mellitus, lupus, celiac disease, Crohn's disease, ulcerative colitis, Guillain-Barre syndrome, scleroderms, Goodpasture's syndrome, Wegener's granulomatosis, autoimmune epilepsy, Rasmussen's encephalitis, Primary biliary sclerosis, Sclerosing cholangitis, Autoimmune hepatitis, Addison's disease, Hashimoto's thyroiditis, Fibromyalgia, Menier's syndrome; transplantation rejection (e.g., prevention of allograft rejection) pernicious anemia, rheumatoid arthritis, systemic lupus erythematosus, dermatomyositis, Sjogren's syndrome, lupus erythematosus, multiple sclerosis, myasthenia gravis, Reiter's syndrome, Grave's disease, and any other autoimmune disease, condition, trait, genotype or phenotype that can respond to the modulation of disease related gene expression in a cell or tissue, alone or in combination with other therapies.

[0256] By “neurologic disease” or “neurological disease” is meant any disease, disorder, or condition affecting the central or peripheral nervous system, including ADHD, AIDS—Neurological Complications, Absence of the Septum Pellucidum, Acquired Epileptiform Aphasia, Acute Disseminated Encephalomyelitis, Adrenoleukodystrophy, Agenesis of the Corpus Callosum, Agnosia, Aicardi Syndrome, Alexander Disease, Alpers' Disease, Alternating Hemiplegia, Alzheimer's Disease, Amyotrophic Lateral Sclerosis, Anencephaly, Aneurysm, Angelman Syndrome, Angiomatosis, Anoxia, Aphasia, Apraxia, Arachnoid Cysts, Arachnoiditis, Arnold-Chiari Malformation, Arteriovenous Malformation, Aspartame, Asperger Syndrome, Ataxia Telangiectasia, Ataxia, Attention Deficit-Hyperactivity Disorder, Autism, Autonomic Dysfunction, Back Pain, Barth Syndrome, Batten Disease, Behcet's Disease, Bell's Palsy, Benign Essential Blepharospasm, Benign Focal Amyotrophy, Benign Intracranial Hypertension, Bernhardt-Roth Syndrome, Binswanger's Disease, Blepharospasm, Bloch-Sulzberger Syndrome, Brachial Plexus Birth Injuries, Brachial Plexus Injuries, Bradbury-Eggleston Syndrome, Brain Aneurysm, Brain Injury, Brain and Spinal Tumors, Brown-Sequard Syndrome, Bulbospinal Muscular Atrophy, Canavan Disease, Carpal Tunnel Syndrome, Causalgia, Cavernomas, Cavernous Angioma, Cavernous Malformation, Central Cervical Cord Syndrome, Central Cord Syndrome, Central Pain Syndrome, Cephalic Disorders, Cerebellar Degeneration, Cerebellar Hypoplasia, Cerebral Aneurysm, Cerebral Arteriosclerosis, Cerebral Atrophy, Cerebral Beriberi, Cerebral Gigantism, Cerebral Hypoxia, Cerebral Palsy, Cerebro-Oculo-Facio-Skeletal Syndrome, Charcot-Marie-Tooth Disorder, Chiari Malformation, Chorea, Choreoacanthocytosis, Chronic Inflammatory Demyelinating Polyneuropathy (CIDP), Chronic Orthostatic Intolerance, Chronic Pain, Cockayne Syndrome Type II, Coffin Lowry Syndrome, Coma, including Persistent Vegetative State, Complex Regional Pain Syndrome, Congenital Facial Diplegia, Congenital Myasthenia, Congenital Myopathy, Congenital Vascular Cavernous Malformations, Corticobasal Degeneration, Cranial Arteritis, Craniosynostosis, Creutzfeldt-Jakob Disease, Cumulative Trauma Disorders, Cushing's Syndrome, Cytomegalic Inclusion Body Disease (CIBD), Cytomegalovirus Infection; Dancing Eyes-Dancing Feet Syndrome, Dandy-Walker Syndrome, Dawson Disease, De Morsier's Syndrome, Dejerine-Klumpke Palsy, Dementia—Multi-Infarct, Dementia—Subcortical, Dementia With Lewy Bodies, Dermatomyositis, Developmental Dyspraxia, Devic's Syndrome, Diabetic Neuropathy, Diffuse Sclerosis, Dravet's Syndrome, Dysautonomia, Dysgraphia, Dyslexia, Dysphagia, Dyspraxia, Dystonias, Early Infantile Epileptic Encephalopathy, Empty Sella Syndrome, Encephalitis Lethargica, Encephalitis and Meningitis, Encephaloceles, Encephalopathy, Encephalotrigeminal Angiomatosis, Epilepsy, Erb's Palsy, Erb-Duchenne and Dejerine-Klumpke Palsies, Fabry's Disease, Fahr's Syndrome, Fainting, Familial Dysautonomia, Familial Hemangioma, Familial Idiopathic Basal Ganglia Calcification, Familial Spastic Paralysis, Febrile Seizures (e.g., GEFS and GEFS plus), Fisher Syndrome, Floppy Infant Syndrome, Friedreich's Ataxia, Gaucher's Disease, Gerstmann's Syndrome, Gerstmann-Straussler-Scheinker Disease, Giant Cell Arteritis, Giant Cell Inclusion Disease, Globoid Cell Leukodystrophy, Glossopharyngeal Neuralgia, Guillain-Barre Syndrome, HTLV-1 Associated Myelopathy, Hallervorden-Spatz Disease, Head Injury, Headache, Hemicrania Continua, Hemifacial Spasm, Hemiplegia Alterans, Hereditary Neuropathies, Hereditary Spastic Paraplegia, Heredopathia Atactica Polyneuritiformis, Herpes Zoster Oticus, Herpes Zoster, Hirayama Syndrome, Holoprosencephaly, Huntington's Disease, Hydranencephaly, Hydrocephalus—Normal Pressure, Hydrocephalus, Hydromyelia, Hypercortisolism, Hypersomnia, Hypertonia, Hypotonia, Hypoxia, Immune-Mediated Encephalomyelitis, Inclusion Body Myositis, Incontinentia Pigmenti, Infantile Hypotonia, Infantile Phytanic Acid Storage Disease, Infantile Refsum Disease, Infantile Spasms, Inflammatory Myopathy, Intestinal Lipodystrophy, Intracranial Cysts, Intracranial Hypertension, Isaac's Syndrome, Joubert Syndrome, Kearns-Sayre Syndrome, Kennedy's Disease, Kinsbourne syndrome, Kleine-Levin syndrome, Klippel Feil Syndrome, Klippel-Trenaunay Syndrome (KTS), Klüver-Bucy Syndrome, Korsakoff's Amnesic Syndrome, Krabbe Disease, Kugelberg-Welander Disease, Kuru, Lambert-Eaton Myasthenic Syndrome, Landau-Kleffner Syndrome, Lateral Femoral Cutaneous Nerve Entrapment, Lateral Medullary Syndrome, Learning Disabilities, Leigh's Disease, Lennox-Gastaut Syndrome, Lesch-Nyhan Syndrome, Leukodystrophy, Levine-Critchley Syndrome, Lewy Body Dementia, Lissencephaly, Locked-In Syndrome, Lou Gehrig's Disease, Lupus—Neurological Sequelae, Lyme Disease—Neurological Complications, Machado-Joseph Disease, Macrencephaly, Megalencephaly, Melkersson-Rosenthal Syndrome, Meningitis, Menkes Disease, Meralgia Paresthetica, Metachromatic Leukodystrophy, Microcephaly, Migraine, Miller Fisher Syndrome, Mini-Strokes, Mitochondrial Myopathies, Mobius Syndrome, Monomelic Amyotrophy, Motor Neuron Diseases, Moyamoya Disease, Mucolipidoses, Mucopolysaccharidoses, Multi-Infarct Dementia, Multifocal Motor Neuropathy, Multiple Sclerosis, Multiple System Atrophy with Orthostatic Hypotension, Multiple System Atrophy, Muscular Dystrophy, Myasthenia—Congenital, Myasthenia Gravis, Myelinoclastic Diffuse Sclerosis, Myoclonic Encephalopathy of Infants, Myoclonus, Myopathy—Congenital, Myopathy—Thyrotoxic, Myopathy, Myotonia Congenita, Myotonia, Narcolepsy, Neuroacanthocytosis, Neurodegeneration with Brain Iron Accumulation, Neurofibromatosis, Neuroleptic Malignant Syndrome, Neurological Complications of AIDS, Neurological Manifestations of Pompe Disease, Neuromyelitis Optica, Neuromyotonia, Neuronal Ceroid Lipofuscinosis, Neuronal Migration Disorders, Neuropathy—Hereditary, Neurosarcoidosis, Neurotoxicity, Nevus Cavernosus, Niemann-Pick Disease, O'Sullivan-McLeod Syndrome, Occipital Neuralgia, Occult Spinal Dysraphism Sequence, Ohtahara Syndrome, Olivopontocerebellar Atrophy, Opsoclonus Myoclonus, Orthostatic Hypotension, Overuse Syndrome, Pain—Chronic, Paraneoplastic Syndromes, Paresthesia, Parkinson's Disease, Parmyotonia Congenita, Paroxysmal Choreoathetosis, Paroxysmal Hemicrania, Parry-Romberg, Pelizaeus-Merzbacher Disease, Pena Shokeir II Syndrome, Perineural Cysts, Periodic Paralyses, Peripheral Neuropathy, Periventricular Leukomalacia, Persistent Vegetative State, Pervasive Developmental Disorders, Phytanic Acid Storage Disease, Pick's Disease, Piriformis Syndrome, Pituitary Tumors, Polymyositis, Pompe Disease, Porencephaly, Post-Polio Syndrome, Postherpetic Neuralgia, Postinfectious Encephalomyelitis, Postural Hypotension, Postural Orthostatic Tachycardia Syndrome, Postural Tachycardia Syndrome, Primary Lateral Sclerosis, Prion Diseases, Progressive Hemifacial Atrophy, Progressive Locomotor Ataxia, Progressive Multifocal Leukoencephalopathy, Progressive Sclerosing Poliodystrophy, Progressive Supranuclear Palsy, Pseudotumor Cerebri, Pyridoxine Dependent and Pyridoxine Responsive Seizure Disorders, Ramsay Hunt Syndrome Type I, Ramsay Hunt Syndrome Type II, Rasmussen's Encephalitis and other autoimmune epilepsies, Reflex Sympathetic Dystrophy Syndrome, Refsum Disease—Infantile, Refsum Disease, Repetitive Motion Disorders, Repetitive Stress Injuries, Restless Legs Syndrome, Retrovirus-Associated Myelopathy, Rett Syndrome, Reye's Syndrome, Riley-Day Syndrome, SUNCT Headache, Sacral Nerve Root Cysts; Saint Vitus-Dance, Salivary Gland Disease, Sandhoff Disease, Schilder's Disease, Schizencephaly, Seizure Disorders, Septo-Optic Dysplasia, Severe Myoclonic Epilepsy of Infancy (SMEI), Shaken Baby Syndrome, Shingles, Shy-Drager Syndrome, Sjogren's Syndrome, Sleep Apnea, Sleeping Sickness, Soto's Syndrome, Spasticity, Spina Bifida, Spinal Cord Infarction, Spinal Cord Injury, Spinal Cord Tumors, Spinal Muscular Atrophy, Spinocerebellar Atrophy, Steele-Richardson-Olszewski Syndrome, Stiff-Person Syndrome, Striatonigral Degeneration, Stroke, Sturge-Weber Syndrome, Subacute Sclerosing Panencephalitis, Subcortical Arteriosclerotic Encephalopathy, Swallowing Disorders, Sydenham Chorea, Syncope, Syphilitic Spinal Sclerosis, Syringohydromyelia, Syringomyelia, Systemic Lupus Erythematosus, Tabes Dorsalis, Tardive Dyskinesia, Tarlov Cysts, Tay-Sachs Disease, Temporal Arteritis, Tethered Spinal Cord Syndrome, Thomsen Disease, Thoracic Outlet Syndrome, Thyrotoxic Myopathy, Tic Douloureux, Todd's Paralysis, Tourette Syndrome, Transient Ischemic Attack, Transmissible Spongiform Encephalopathies, Transverse Myelitis, Traumatic Brain Injury, Tremor, Trigeminal Neuralgia, Tropical Spastic Paraparesis, Tuberous Sclerosis, Vascular Erectile Tumor, Vasculitis including Temporal Arteritis, Von Economo's Disease, Von Hippel-Lindau disease (VHL), Von Recklinghausen's Disease, Wallenberg's Syndrome, Werdnig-Hoffman Disease, Wernicke-Korsakoff Syndrome, West Syndrome, Whipple's Disease, Williams Syndrome, Wilson's Disease, X-Linked Spinal and Bulbar Muscular Atrophy, and Zellweger Syndrome.

[0257] By “infectious disease” as used herein is meant any disease, condition, trait, genotype or phenotype associated with an infectious agent, such as a virus, bacteria, fungus, prion, or parasite. Non-limiting examples of various viral genes that can be targeted using siNA molecules of the invention include Hepatitis C Virus (HCV, for example Genbank Accession Nos: D11168, D50483.1, L38318 and S82227), Hepatitis B Virus (HBV, for example GenBank Accession No. AF100308.1), Human Immunodeficiency Virus type I (HIV-1, for example GenBank Accession No. U51188), Human Immunodeficiency Virus type 2 (HIV-2, for example GenBank Accession No. X60667), West Nile Virus (WNV for example GenBank accession No. NC_{—}001563), cytomegalovirus (CMV for example GenBank Accession No. NC_{—}001347), respiratory syncytial virus (RSV for example GenBank Accession No. NC_{—}001781), influenza virus (for example GenBank Accession No. AF037412, rhinovirus (for example, GenBank accession numbers: D00239, X02316, X01087, L24917, M16248, K02121, X01087), papillomavirus (for example GenBank Accession No. NC_{—}001353), Herpes Simplex Virus (HSV for example GenBank Accession No. NC_{—}001345), and other viruses such as HTLV (for example GenBank Accession No. AJ430458). Due to the high sequence variability of many viral genomes, selection of siRNA molecules for broad therapeutic applications would likely involve the conserved regions of the viral genome. Nonlimiting examples of conserved regions of the viral genomes include but are not limited to 5′-Non Coding Regions (NCR), 3′-Non Coding Regions (NCR) and/or internal ribosome entry sites (IRES). siRNA molecules designed against conserved regions of various viral genomes will enable efficient inhibition of viral replication in diverse patient populations and may ensure the effectiveness of the siRNA molecules against viral quasi species which evolve due to mutations in the non-conserved regions of the viral genome. Non-limiting examples of bacterial infections include Actinomycosis, Anthrax, Aspergillosis, Bacteremia, Bacterial Infections and Mycoses, Bartonella Infections, Botulism, Brucellosis, Burkholderia Infections, Campylobacter Infections, Candidiasis, Cat-Scratch Disease, Chlamydia Infections, Cholera, Clostridium Infections, Coccidioidomycosis, Cross Infection, Cryptococcosis, Dermatomycoses, Dermatomycoses, Diphtheria, Ehrlichiosis, Escherichia coli Infections, Fasciitis, Necrotizing, Fusobacterium Infections, Gas Gangrene, Gram-Negative Bacterial Infections, Gram-Positive Bacterial Infections, Histoplasmosis, Impetigo, Klebsiella Infections, Legionellosis, Leprosy, Leptospirosis, Listeria Infections, Lyme Disease, Maduromycosis, Melioidosis, Mycobacterium Infections, Mycoplasma Infections, Mycoses, Nocardia Infections, Onychomycosis, Ornithosis, Plague, Pneumococcal Infections, Pseudomonas Infections, Q Fever, Rat-Bite Fever, Relapsing Fever, Rheumatic Fever, Rickettsia Infections, Rocky Mountain Spotted Fever, Salmonella Infections, Scarlet Fever, Scrub Typhus, Sepsis, Sexually Transmitted Diseases—Bacterial, Bacterial Skin Diseases, Staphylococcal Infections, Streptococcal Infections, Tetanus, Tick-Borne Diseases, Tuberculosis, Tularemia, Typhoid Fever, Typhus, Epidemic Louse-Borne, Vibrio Infections, Yaws, Yersinia Infections, Zoonoses, and Zygomycosis. Non-limiting examples of fungal infections include Aspergillosis, Blastomycosis, Coccidioidomycosis, Cryptococcosis, Fungal Infections of Fingernails and Toenails, Fungal Sinusitis, Histoplasmosis, Histoplasmosis, Mucormycosis, Nail Fungal Infection, Paracoccidioidomycosis, Sporotrichosis, Valley Fever (Coccidioidomycosis), and Mold Allergy.

[0258] By “ocular disease” as used herein is meant, any disease, condition, trait, genotype or phenotype of the eye and related structures, such as Cystoid Macular Edema, Asteroid Hyalosis, Pathological Myopia and Posterior Staphyloma, Toxocariasis (Ocular Larva Migrans), Retinal Vein Occlusion, Posterior Vitreous Detachment, Tractional Retinal Tears, Epiretinal Membrane, Diabetic Retinopathy, Lattice Degeneration, Retinal Vein Occlusion, Retinal Artery Occlusion, Macular Degeneration (e.g., age related macular degeneration such as wet AMD or dry AMD), Toxoplasmosis, Choroidal Melanoma, Acquired Retinoschisis, Hollenhorst Plaque, Idiopathic Central Serous Chorioretinopathy, Macular Hole, Presumed Ocular Histoplasmosis Syndrome, Retinal Macroaneursym, Retinitis Pigmentosa, Retinal Detachment, Hypertensive Retinopathy, Retinal Pigment Epithelium (RPE) Detachment, Papillophlebitis, Ocular Ischemic Syndrome, Coats' Disease, Leber's Miliary Aneurysm, Conjunctival Neoplasms, Allergic Conjunctivitis, Vernal Conjunctivitis, Acute Bacterial Conjunctivitis, Allergic Conjunctivitis & Vernal Keratoconjunctivitis, Viral Conjunctivitis, Bacterial Conjunctivitis, Chlamydial & Gonococcal Conjunctivitis, Conjunctival Laceration, Episcleritis, Scleritis, Pingueculitis, Pterygium, Superior Limbic Keratoconjunctivitis (SLK of Theodore), Toxic Conjunctivitis, Conjunctivitis with Pseudomembrane, Giant Papillary Conjunctivitis, Terrien's Marginal Degeneration, Acanthamoeba Keratitis, Fungal Keratitis, Filamentary Keratitis, Bacterial Keratitis, Keratitis Sicca/Dry Eye Syndrome, Bacterial Keratitis, Herpes Simplex Keratitis, Sterile Corneal Infiltrates, Phlyctenulosis, Corneal Abrasion & Recurrent Corneal Erosion, Corneal Foreign Body, Chemical Burs, Epithelial Basement Membrane Dystrophy (EBMD), Thygeson's Superficial Punctate Keratopathy, Corneal Laceration, Salzmann's Nodular Degeneration, Fuchs' Endothelial Dystrophy, Crystalline Lens Subluxation, Ciliary-Block Glaucoma, Primary Open-Angle Glaucoma, Pigment Dispersion Syndrome and Pigmentary Glaucoma, Pseudoexfoliation Syndrome and Pseudoexfoliative Glaucoma, Anterior Uveitis, Primary Open Angle Glaucoma, Uveitic Glaucoma & Glaucomatocyclitic Crisis, Pigment Dispersion Syndrome & Pigmentary Glaucoma, Acute Angle Closure Glaucoma, Anterior Uveitis, Hyphema, Angle Recession Glaucoma, Lens Induced Glaucoma, Pseudoexfoliation Syndrome and Pseudoexfoliative Glaucoma, Axenfeld-Rieger Syndrome, Neovascular Glaucoma, Pars Planitis, Choroidal Rupture, Duane's Retraction Syndrome, Toxic/Nutritional Optic Neuropathy, Aberrant Regeneration of Cranial Nerve III, Intracranial Mass Lesions, Carotid-Cavernous Sinus Fistula, Anterior Ischemic Optic Neuropathy, Optic Disc Edema & Papilledema, Cranial Nerve III Palsy, Cranial Nerve IV Palsy, Cranial Nerve VI Palsy, Cranial Nerve VII (Facial Nerve) Palsy, Horner's Syndrome, Internuclear Ophthalmoplegia, Optic Nerve Head Hypoplasia, Optic Pit, Tonic Pupil, Optic Nerve Head Drusen, Demyelinating Optic Neuropathy (Optic Neuritis, Retrobulbar Optic Neuritis), Amaurosis Fugax and Transient Ischemic Attack, Pseudotumor Cerebri, Pituitary Adenoma, Molluscum Contagiosum, Canaliculitis, Verruca and Papilloma, Pediculosis and Pthiriasis, Blepharitis, Hordeolum, Preseptal Cellulitis, Chalazion, Basal Cell Carcinoma, Herpes Zoster Ophthalmicus, Pediculosis & Phthiriasis, Blow-out Fracture, Chronic Epiphora, Dacryocystitis, Herpes Simplex Blepharitis, Orbital Cellulitis, Senile Entropion, and Squamous Cell Carcinoma.

[0259] In one embodiment of the present invention, each sequence of a siNA molecule of the invention is independently about 18 to about 24 nucleotides in length, in specific embodiments about 18, 19, 20, 21, 22, 23, or 24 nucleotides in length. In another embodiment, the siNA duplexes of the invention independently comprise about 17 to about 23 base pairs (e.g., about 17, 18, 19, 20, 21, 22 or 23). In yet another embodiment, siNA molecules of the invention comprising hairpin or circular structures are about 35 to about 55 (e.g., about 35, 40, 45, 50 or 55) nucleotides in length, or about 38 to about 44 (e.g., 38, 39, 40, 41, 42, 43 or 44) nucleotides in length and comprising about 16 to about 22 (e.g., about 16, 17, 18, 19, 20, 21 or 22) base pairs. Exemplary siNA molecules of the invention are shown in Table I and/or FIGS. 18-19.

[0260] As used herein “cell” is used in its usual biological sense, and does not refer to an entire multicellular organism, e.g., specifically does not refer to a human. The cell can be present in an organism, e.g., birds, plants and mammals such as humans, cows, sheep, apes, monkeys, swine, dogs, and cats. The cell can be prokaryotic (e.g., bacterial cell) or eukaryotic (e.g., mammalian or plant cell). The cell can be of somatic or germ line origin, totipotent or pluripotent, dividing or non-dividing. The cell can also be derived from or can comprise a gamete or embryo, a stem cell, or a fully differentiated cell.

[0261] The siNA molecules of the invention are added directly, or can be complexed with cationic lipids, packaged within liposomes, or otherwise delivered to target cells or tissues. The nucleic acid or nucleic acid complexes can be locally administered to relevant tissues ex vivo, or in vivo through injection, infusion pump or stent, with or without their incorporation in biopolymers. In particular embodiments, the nucleic acid molecules of the invention comprise sequences shown in Table I and/or FIGS. 18-19. Examples of such nucleic acid molecules consist essentially of sequences defined in these tables and figures. Furthermore, the chemically modified constructs described in Table IV can be applied to any siNA sequence of the invention.

[0262] In another aspect, the invention provides mammalian cells containing one or more siNA molecules of this invention. The one or more siNA molecules can independently be targeted to the same or different sites.

[0263] By “RNA” is meant a molecule comprising at least one ribonucleotide residue. By “ribonucleotide” is meant a nucleotide with a hydroxyl group at the 2′ position of a β-D-ribo-furanose moiety. The terms include double-stranded RNA, single-stranded RNA, isolated RNA such as partially purified RNA, essentially pure RNA, synthetic RNA, recombinantly produced RNA, as well as altered RNA that differs from naturally occurring RNA by the addition, deletion, substitution and/or alteration of one or more nucleotides. Such alterations can include addition of non-nucleotide material, such as to the end(s) of the siNA or internally, for example at one or more nucleotides of the RNA. Nucleotides in the RNA molecules of the instant invention can also comprise non-standard nucleotides, such as non-naturally occurring nucleotides or chemically synthesized nucleotides or deoxynucleotides. These altered RNAs can be referred to as analogs or analogs of naturally-occurring RNA.

[0264] By “subject” is meant an organism, which is a donor or recipient of explanted cells or the cells themselves. “Subject” also refers to an organism to which the nucleic acid molecules of the invention can be administered. A subject can be a mammal or mammalian cells, including a human or human cells.

[0265] The term “ligand” refers to any compound or molecule, such as a drug, peptide, hormone, or neurotransmitter, that is capable of interacting with another compound, such as a receptor, either directly or indirectly. The receptor that interacts with a ligand can be present on the surface of a cell or can alternately be an intercellular receptor. Interaction of the ligand with the receptor can result in a biochemical reaction, or can simply be a physical interaction or association.

[0266] The term “phosphorothioate” as used herein refers to an internucleotide linkage having Formula I, wherein Z and/or W comprise a sulfur atom. Hence, the term phosphorothioate refers to both phosphorothioate and phosphorodithioate internucleotide linkages.

[0267] The term “phosphonoacetate” as used herein refers to an internucleotide linkage having Formula I, wherein Z and/or W comprise an acetyl or protected acetyl group.

[0268] The term “thiophosphonoacetate” as used herein refers to an internucleotide linkage having Formula I, wherein Z comprises an acetyl or protected acetyl group and W comprises a sulfur atom or alternately W comprises an acetyl or protected acetyl group and Z comprises a sulfur atom.

[0269] The term “universal base” as used herein refers to nucleotide base analogs that form base pairs with each of the natural DNA/RNA bases with little discrimination between them. Non-limiting examples of universal bases include C-phenyl, C-naphthyl and other aromatic derivatives, inosine, azole carboxamides, and nitroazole derivatives such as 3-nitropyrrole, 4-nitroindole, 5-nitroindole, and 6-nitroindole as known in the art (see for example Loakes, 2001, Nucleic Acids Research, 29, 2437-2447).

[0270] The term “acyclic nucleotide” as used herein refers to any nucleotide having an acyclic ribose sugar, for example where any of the ribose carbons (C1, C2, C3, C4, or C5), are independently or in combination absent from the nucleotide.

[0271] The nucleic acid molecules of the instant invention, individually, or in combination or in conjunction with other drugs, can be used to treat diseases or conditions discussed herein (e.g., cancers and the proliferative conditions, viral infection, inflammatory disease, autoimmunity, pulmonary disease, renal disease, ocular disease, etc.). For example, to treat a particular disease, condition, trait, genotype or phenotype, the siNA molecules can be administered to a subject or can be administered to other appropriate cells evident to those skilled in the art, individually or in combination with one or more drugs under conditions suitable for the treatment.

[0272] In one embodiment, the invention features a method for treating or preventing a disease, condition, trait, genotype or phenotype in a subject, wherein the disease, condition, trait, genotype or phenotype is related to angiogenesis or neovascularization, comprising administering to the subject a siNA molecule of the invention under conditions suitable for the treatment or prevention of the disease, condition, trait, genotype or phenotype in the subject, alone or in conjunction with one or more other therapeutic compounds. In another embodiment, the disease, condition, trait, genotype or phenotype comprises tumor angiogenesis and cancerous conditions herein, including but not limited to breast cancer, lung cancer (including non-small cell lung carcinoma), prostate cancer, colorectal cancer, brain cancer, esophageal cancer, bladder cancer, pancreatic cancer, cervical cancer, head and neck cancer, skin cancers, nasopharyngeal carcinoma, liposarcoma, epithelial carcinoma, renal cell carcinoma, gallbladder adeno carcinoma, parotid adenocarcinoma, ovarian cancer, melanoma, lymphoma, glioma, endometrial sarcoma, multidrug resistant cancers, diabetic retinopathy, macular degeneration, age related macular degeneration, neovascular glaucoma, myopic degeneration, arthritis, psoriasis, endometriosis, female reproduction, verruca vulgaris, angiofibroma of tuberous sclerosis, pot-wine stains, Sturge Weber syndrome, Kippel-Trenaunay-Weber syndrome, Osler-Weber-Rendu syndrome, renal disease such as Autosomal dominant polycystic kidney disease (ADPKD), restenosis, arteriosclerosis, and any other diseases or conditions that are related to gene expression or will respond to RNA interference in a cell or tissue, alone or in combination with other therapies.

[0273] In one embodiment, the invention features a method for treating or preventing an ocular disease, condition, trait, genotype or phenotype in a subject, wherein the ocular disease, condition, trait, genotype or phenotype is related to angiogenesis or neovascularization, comprising administering to the subject a siNA molecule of the invention under conditions suitable for the treatment or prevention of the disease, condition, trait, genotype or phenotype in the subject, alone or in conjunction with one or more other therapeutic compounds. In another embodiment, the ocular disease, condition, trait, genotype or phenotype comprises macular degeneration, age related macular degeneration, diabetic retinopathy, neovascular glaucoma, myopic degeneration, trachoma, scarring of the eye, cataract, ocular inflammation and/or ocular infections.

[0274] In one embodiment, the invention features a method for treating or preventing tumor angiogenesis in a subject, comprising administering to the subject a siNA molecule of the invention under conditions suitable for the treatment or prevention of tumor angiogenesis in the subject, alone or in conjunction with one or more other therapeutic compounds.

[0275] In one embodiment, the invention features a method for treating or preventing viral infection or replication in a subject, comprising administering to the subject a siNA molecule of the invention under conditions suitable for the treatment or prevention of viral infection or replication in the subject, alone or in conjunction with one or more other therapeutic compounds.

[0276] In one embodiment, the invention features a method for treating or preventing autoimmune disease in a subject, comprising administering to the subject a siNA molecule of the invention under conditions suitable for the treatment or prevention of autoimmune disease in the subject, alone or in conjunction with one or more other therapeutic compounds.

[0277] In one embodiment, the invention features a method for treating or preventing inflammation in a subject, comprising administering to the subject a siNA molecule of the invention under conditions suitable for the treatment or prevention of inflammation in the subject, alone or in conjunction with one or more other therapeutic compounds.

[0278] In a further embodiment, the siNA molecules can be used in combination with other known treatments to treat conditions or diseases discussed above. For example, the described molecules could be used in combination with one or more known therapeutic agents to treat a disease, condition, trait, genotype or phenotype. Non-limiting examples of other therapeutic agents that can be readily combined with a siNA molecule of the invention are enzymatic nucleic acid molecules, allosteric nucleic acid molecules, antisense, decoy, or aptamer nucleic acid molecules, antibodies such as monoclonal antibodies, small molecules, and other organic and/or inorganic compounds including metals, salts and ions.

[0279] In one embodiment, the invention features a method for treating or preventing a disease or condition in a subject, wherein the disease or condition is related to angiogenesis or neovascularization, comprising administering to the subject a siNA molecule of the invention under conditions suitable for the treatment or prevention of the disease or condition in the subject, alone or in conjunction with one or more other therapeutic compounds. In another embodiment, the disease or condition resulting from angiogenesis, such as tumor angiogenesis leading to cancer, such as without limitation to breast cancer, lung cancer (including non-small cell lung carcinoma), prostate cancer, colorectal cancer, brain cancer, esophageal cancer, bladder cancer, pancreatic cancer, cervical cancer, head and neck cancer, skin cancers, nasopharyngeal carcinoma, liposarcoma, epithelial carcinoma, renal cell carcinoma, gallbladder adeno carcinoma, parotid adenocarcinoma, ovarian cancer, melanoma, lymphoma, glioma, endometrial sarcoma, and multidrug resistant cancers, diabetic retinopathy, macular degeneration, age related macular degeneration, macular adema, neovascular glaucoma, myopic degeneration, arthritis, psoriasis, endometriosis, female reproduction, verruca vulgaris, angiofibroma of tuberous sclerosis, pot-wine stains, Sturge Weber syndrome, Kippel-Trenaunay-Weber syndrome, Osler-Weber-Rendu syndrome, renal disease such as Autosomal dominant polycystic kidney disease (ADPKD), restenosis, arteriosclerosis, and any other diseases or conditions that are related to gene expression or will respond to RNA interference in a cell or tissue, alone or in combination with other therapies.

[0280] In one embodiment, the invention features a method for treating or preventing an ocular disease or condition in a subject, wherein the ocular disease or condition is related to angiogenesis or neovascularization (such as those involving genes in the vascular endothelial growth factor, VEGF pathway or TGF-beta pathway), comprising administering to the subject a siNA molecule of the invention under conditions suitable for the treatment or prevention of the disease or condition in the subject, alone or in conjunction with one or more other therapeutic compounds. In another embodiment, the ocular disease or condition comprises macular degeneration, age related macular degeneration, diabetic retinopathy, macular adema, neovascular glaucoma, myopic degeneration, trachoma, scarring of the eye, cataract, ocular inflammation and/or ocular infections.

[0281] In one embodiment, the invention features a method of locally administering (e.g., by injection, such as intraocular, intratumoral, periocular, intracranial, etc., topical administration, catheter or the like) to a tissue or cell (e.g., ocular or retinal, brain, CNS) a siNA molecule or a vector expressing siNA molecule, comprising nucleotide sequence that is complementary to nucleotide sequence of target RNA, or a portion thereof, (e.g., target RNA encoding VEGF or a VEGF receptor) comprising contacting said tissue of cell with said double stranded RNA under conditions suitable for said local administration.

[0282] In one embodiment, the invention features a method of topically administering (e.g. by dermal, transdermal, hair follicle administration etc.,) to a tissue, organ or cell (e.g., skin, hair follicle) a siNA molecule or a vector expressing siNA molecule, comprising nucleotide sequence that is complementary to nucleotide sequence of target RNA, or a portion thereof, expressed in such organ, cell or tissue (e.g., hairless gene, 5-alpha reductase, nude gene, desmoglein 4 gene, TGP-beta, PDGF, BCL-2 and the like) comprising contacting said tissue of cell with said double stranded RNA under conditions suitable for said topical administration. Such topical administration can be used to treat dermatological disease, indication, conditions, trait, genotype or phenotype, or for cosmetic applications such as acne, psoriasis, melanoma, allopecia, hair removal etc. In one embodiment, the invention features a method of systemically administering (e.g., by injection, such as subcutaneous, intravenous, topical administration, or the like) to a tissue or cell in a subject, a double stranded RNA formed by a siNA molecule or a vector expressing siNA molecule comprising nucleotide sequence that is complementary to nucleotide sequence of target RNA, or a portion thereof, (e.g., target RNA encoding VEGF or a VEGF receptor) comprising contacting said subject with said double stranded RNA under conditions suitable for said systemic administration.

[0283] In one embodiment, the invention features a method for treating or preventing tumor angiogenesis in a subject comprising administering to the subject a siNA molecule of the invention under conditions suitable for the treatment or prevention of tumor angiogenesis in the subject, alone or in conjunction with one or more other therapeutic compounds.

[0284] In one embodiment, the invention features a method for treating or preventing viral infection or replication in a subject comprising administering to the subject a siNA molecule of the invention under conditions suitable for the treatment or prevention of viral infection or replication in the subject, alone or in conjunction with one or more other therapeutic compounds.

[0285] In one embodiment, the invention features a method for treating or preventing autoimmune disease in a subject comprising administering to the subject a siNA molecule of the invention under conditions suitable for the treatment or prevention of autoimmune disease in the subject, alone or in conjunction with one or more other therapeutic compounds.

[0286] In one embodiment, the invention features a method for treating or preventing neurologic disease (e.g., Alzheimer's disease, Huntington disease, Parkinson disease, ALS, multiple sclerosis, epilepsy, etc.) in a subject comprising administering to the subject a siNA molecule of the invention under conditions suitable for the treatment or prevention of neurologic disease in the subject, alone or in conjunction with one or more other therapeutic compounds.

[0287] In one embodiment, the invention features a method for treating or preventing inflammation in a subject comprising administering to the subject a siNA molecule of the invention under conditions suitable for the treatment or prevention of inflammation in the subject, alone or in conjunction with one or more other therapeutic compounds.

[0288] Other features and advantages of the invention will be apparent from the following description of the preferred embodiments thereof, and from the claims.

### BRIEF DESCRIPTION OF THE DRAWINGS

[0289] FIG. 1 shows a non-limiting example of a scheme for the synthesis of siNA molecules. The complementary siNA sequence strands, strand 1 and strand 2, are synthesized in tandem and are connected by a cleavable linkage, such as a nucleotide succinate or abasic succinate, which can be the same or different from the cleavable linker used for solid phase synthesis on a solid support. The synthesis can be either solid phase or solution phase, in the example shown, the synthesis is a solid phase synthesis. The synthesis is performed such that a protecting group, such as a dimethoxytrityl group, remains intact on the terminal nucleotide of the tandem oligonucleotide. Upon cleavage and deprotection of the oligonucleotide, the two siNA strands spontaneously hybridize to form a siNA duplex, which allows the purification of the duplex by utilizing the properties of the terminal protecting group, for example by applying a trityl on purification method wherein only duplexes/oligonucleotides with the terminal protecting group are isolated.

[0290] FIG. 2 shows a MALDI-TOF mass spectrum of a purified siNA duplex synthesized by a method of the invention. The two peaks shown correspond to the predicted mass of the separate siNA sequence strands. This result demonstrates that the siNA duplex generated from tandem synthesis can be purified as a single entity using a simple trityl-on purification methodology.

[0291] FIG. 3 shows the results of a stability assay used to determine the serum stability of chemically modified siNA constructs compared to a siNA control consisting of all RNA with 3′-TT termini. T ½ values are shown for duplex stability.

[0292] FIG. 4 shows the results of an RNAi activity screen of several phosphorothioate modified siNA constructs using a luciferase reporter system.

[0293] FIG. 5 shows the results of an RNAi activity screen of several phosphorothioate and universal base modified siNA constructs using a luciferase reporter system.

[0294] FIG. 6 shows the results of an RNAi activity screen of several 2′-O-methyl modified siNA constructs using a luciferase reporter system.

[0295] FIG. 7 shows the results of an RNAi activity screen of several 2′-O-methyl and 2′-deoxy-2′-fluoro modified siNA constructs using a luciferase reporter system.

[0296] FIG. 8 shows the results of an RNAi activity screen of a phosphorothioate modified siNA construct using a luciferase reporter system.

[0297] FIG. 9 shows the results of an RNAi activity screen of an inverted deoxyabasic modified siNA construct generated via tandem synthesis using a luciferase reporter system.

[0298] FIG. 10 shows the results of an RNAi activity screen of chemically modified siNA constructs including 3′-glyceryl modified siNA constructs compared to an all RNA control siNA construct using a luciferase reporter system. These chemically modified siNAs were compared in the luciferase assay described herein at 1 nM and 10 nM concentration using an all RNA siNA control (siGL2) having 3′-terminal dithymidine (TT) and its corresponding inverted control (Inv siGL2). The background level of luciferase expression in the HeLa cells is designated by the “cells” column. Sense and antisense strands of chemically modified siNA constructs are shown by Sirna/RPI number (sense strand/antisense strand). Sequences corresponding to these Sirna/RPI numbers are shown in Table I.

[0299] FIG. 11 shows the results of an RNAi activity screen of chemically modified siNA constructs. The screen compared various combinations of sense strand chemical modifications and antisense strand chemical modifications. These chemically modified siNAs were compared in the luciferase assay described herein at 1 nM and 10 nM concentration using an all RNA siNA control (siGL2) having 3′-terminal dithymidine (TT) and its corresponding inverted control (Inv siGL2). The background level of luciferase expression in the HeLa cells is designated by the “cells” column. Sense and antisense strands of chemically modified siNA constructs are shown by Sirna/RPI number (sense strand/antisense strand). Sequences corresponding to these Sirna/RPI numbers are shown in Table I.

[0300] FIG. 12 shows the results of an RNAi activity screen of chemically modified siNA constructs. The screen compared various combinations of sense strand chemical modifications and antisense strand chemical modifications. These chemically modified siNAs were compared in the luciferase assay described herein at 1 nM and 10 nM concentration using an all RNA siNA control (siGL2) having 3′-terminal dithymidine (TT) and its corresponding inverted control (Inv siGL2). The background level of luciferase expression in the HeLa cells is designated by the “cells” column. Sense and antisense strands of chemically modified siNA constructs are shown by Sirna/RPI number (sense strand/antisense strand). Sequences corresponding to these Sirna/RPI numbers are shown in Table I. In addition, the antisense strand alone (Sinra/RPI 30430) and an inverted control (Sirna/RPI 30227/30229, having matched chemistry to Sirna/RPI (30063/30224) was compared to the siNA duplexes described above.

[0301] FIG. 13 shows the results of an RNAi activity screen of chemically modified siNA constructs. The screen compared various combinations of sense strand chemical modifications and antisense strand chemical modifications. These chemically modified siNAs were compared in the luciferase assay described herein at 1 nM and 10 nM concentration using an all RNA siNA control (siGL2) having 3′-terminal dithymidine (TT) and its corresponding inverted control (Inv siGL2). The background level of luciferase expression in the HeLa cells is designated by the “cells” column. Sense and antisense strands of chemically modified siNA constructs are shown by Sirna/RPI number (sense strand/antisense strand). Sequences corresponding to these Sirna/RPI numbers are shown in Table I. In addition, an inverted control (Sirna/RPI 30226/30229), having matched chemistry to Sirna/RPI (30222/30224) was compared to the siNA duplexes described above.

[0302] FIG. 14 shows the results of an RNAi activity screen of chemically modified siNA constructs including various 3′-terminal modified siNA constructs compared to an all RNA control siNA construct using a luciferase reporter system. These chemically modified siNAs were compared in the luciferase assay described herein at 1 nM and 10 nM concentration using an all RNA siNA control (siGL2) having 3′-terminal dithymidine (TT) and its corresponding inverted control (Inv siGL2). The background level of luciferase expression in the HeLa cells is designated by the “cells” column. Sense and antisense strands of chemically modified siNA constructs are shown by Sirna/RPI number (sense strand/antisense strand). Sequences corresponding to these Sirna/RPI numbers are shown in Table I.

[0303] FIG. 15 shows the results of an RNAi activity screen of chemically modified siNA constructs. The screen compared various combinations of sense strand chemistries compared to a fixed antisense strand chemistry. These chemically modified siNAs were compared in the luciferase assay described herein at 1 nM and 10 nM concentration using an all RNA siNA control (siGL2) having 3′-terminal dithymidine (TT) and its corresponding inverted control (Inv siGL2). The background level of luciferase expression in the HeLa cells is designated by the “cells” column. Sense and antisense strands of chemically modified siNA constructs are shown by Sirna/RPI number (sense strand/antisense strand). Sequences corresponding to these Sirna/RPI numbers are shown in Table I.

[0304] FIG. 16 shows the results of a siNA titration study using a luciferase reporter system, wherein the RNAi activity of a phosphorothioate modified siNA construct is compared to that of a siNA construct consisting of all ribonucleotides except for two terminal thymidine residues.

[0305] FIG. 17 shows a non-limiting proposed mechanistic representation of target RNA degradation involved in RNAi. Double-stranded RNA (dsRNA), which is generated by RNA-dependent RNA polymerase (RdRP) from foreign single-stranded RNA, for example viral, transposon, or other exogenous RNA, activates the DICER enzyme that in turn generates siNA duplexes. Alternately, synthetic or expressed siNA can be introduced directly into a cell by appropriate means. An active siNA complex forms which recognizes a target RNA, resulting in degradation of the target RNA by the RISC endonuclease complex or in the synthesis of additional RNA by RNA-dependent RNA polymerase (RdRP), which can activate DICER and result in additional siNA molecules, thereby amplifying the RNAi response.

[0306] FIG. 18A-F shows non-limiting examples of chemically-modified siNA constructs of the present invention. In the figure, N stands for any nucleotide (adenosine, guanosine, cytosine, uridine, or optionally thymidine, for example thymidine can be substituted in the overhanging regions designated by parenthesis (N N). Various modifications are shown for the sense and antisense strands of the siNA constructs.

[0307] FIG. 18A: The sense strand comprises 21 nucleotides wherein the two terminal 3′-nucleotides are optionally base paired and wherein all nucleotides present are ribonucleotides except for (N N) nucleotides, which can comprise ribonucleotides, deoxynucleotides, universal bases, or other chemical modifications described herein. The antisense strand comprises 21 nucleotides, optionally having a 3′-terminal glyceryl moiety wherein the two terminal 3′-nucleotides are optionally complementary to the target RNA sequence, and wherein all nucleotides present are ribonucleotides except for (N N) nucleotides, which can comprise ribonucleotides, deoxynucleotides, universal bases, or other chemical modifications described herein. A modified internucleotide linkage, such as a phosphorothioate, phosphorodithioate or other modified internucleotide linkage as described herein, shown as “s”, optionally connects the (N N) nucleotides in the antisense strand.

[0308] FIG. 18B: The sense strand comprises 21 nucleotides wherein the two terminal 3′-nucleotides are optionally base paired and wherein all pyrimidine nucleotides that may be present are 2′deoxy-2′-fluoro modified nucleotides and all purine nucleotides that may be present are 2′-O-methyl modified nucleotides except for (N N) nucleotides, which can comprise ribonucleotides, deoxynucleotides, universal bases, or other chemical modifications described herein. The antisense strand comprises 21 nucleotides, optionally having a 3′-terminal glyceryl moiety and wherein the two terminal 3′-nucleotides are optionally complementary to the target RNA sequence, and wherein all pyrimidine nucleotides that may be present are 2′-deoxy-2′-fluoro modified nucleotides and all purine nucleotides that may be present are 2′-O-methyl modified nucleotides except for (N N) nucleotides, which can comprise ribonucleotides, deoxynucleotides, universal bases, or other chemical modifications described herein. A modified internucleotide linkage, such as a phosphorothioate, phosphorodithioate or other modified internucleotide linkage as described herein, shown as “s”, optionally connects the (N N) nucleotides in the sense and antisense strand.

[0309] FIG. 18C: The sense strand comprises 21 nucleotides having 5′- and 3′-terminal cap moieties wherein the two terminal 3′-nucleotides are optionally base paired and wherein all pyridine nucleotides that may be present are 2′-O-methyl or 2′-deoxy-2′-fluoro modified nucleotides except for (N N) nucleotides, which can comprise ribonucleotides, deoxynucleotides, universal bases, or other chemical modifications described herein. The antisense strand comprises 21 nucleotides, optionally having a 3′-terminal glyceryl moiety and wherein the two terminal 3′-nucleotides are optionally complementary to the target RNA sequence, and wherein all pyrimidine nucleotides that may be present are 2′-deoxy-2′-fluoro modified nucleotides except for (N N) nucleotides, which can comprise ribonucleotides, deoxynucleotides, universal bases, or other chemical modifications described herein. A modified internucleotide linkage, such as a phosphorothioate, phosphorodithioate or other modified internucleotide linkage as described herein, shown as “s”, optionally connects the (N N) nucleotides in the antisense strand.

[0310] FIG. 18D: The sense strand comprises 21 nucleotides having 5′- and 3′-terminal cap moieties wherein the two terminal 3′-nucleotides are optionally base paired and wherein all pyrimidine nucleotides that may be present are 2′-deoxy-2′-fluoro modified nucleotides except for (N N) nucleotides, which can comprise ribonucleotides, deoxynucleotides, universal bases, or other chemical modifications described herein and wherein and all purine nucleotides that may be present are 2′-deoxy nucleotides. The antisense strand comprises 21 nucleotides, optionally having a 3′-terminal glyceryl moiety and wherein the two terminal 3′-nucleotides are optionally complementary to the target RNA sequence, wherein all pyrimidine nucleotides that may be present are 2′-deoxy-2′-fluoro modified nucleotides and all purine nucleotides that may be present are 2′-O-methyl modified nucleotides except for (N N) nucleotides, which can comprise ribonucleotides, deoxynucleotides, universal bases, or other chemical modifications described herein. A modified internucleotide linkage, such as a phosphorothioate, phosphorodithioate or other modified internucleotide linkage as described herein, shown as “s”, optionally connects the (N N) nucleotides in the antisense strand.

[0311] FIG. 18E: The sense strand comprises 21 nucleotides having 5′- and 3′-terminal cap moieties wherein the two terminal 3′-nucleotides are optionally base paired and wherein all pyrimidine nucleotides that may be present are 2′-deoxy-2′-fluoro modified nucleotides except for (N N) nucleotides, which can comprise ribonucleotides, deoxynucleotides, universal bases, or other chemical modifications described herein. The antisense strand comprises 21 nucleotides, optionally having a 3′-terminal glyceryl moiety and wherein the two terminal 3′-nucleotides are optionally complementary to the target RNA sequence, and wherein all pyrimidine nucleotides that may be present are 2′-deoxy-2′-fluoro modified nucleotides and all purine nucleotides that may be present are 2′-O-methyl modified nucleotides except for (N N) nucleotides, which can comprise ribonucleotides, deoxynucleotides, universal bases, or other chemical modifications described herein. A modified internucleotide linkage, such as a phosphorothioate, phosphorodithioate or other modified internucleotide linkage as described herein, shown as “s”, optionally connects the (N N) nucleotides in the antisense strand.

[0312] FIG. 18F: The sense strand comprises 21 nucleotides having 5′- and 3′-terminal cap moieties wherein the two terminal 3′-nucleotides are optionally base paired and wherein all pyrimidine nucleotides that may be present are 2′-deoxy-2′-fluoro modified nucleotides except for (N N) nucleotides, which can comprise ribonucleotides, deoxynucleotides, universal bases, or other chemical modifications described herein and wherein and all purine nucleotides that may be present are 2′-deoxy nucleotides. The antisense strand comprises 21 nucleotides, optionally having a 3′-terminal glyceryl moiety and wherein the two terminal 3′-nucleotides are optionally complementary to the target RNA sequence, and having one 3′-terminal phosphorothioate internucleotide linkage and wherein all pyrimidine nucleotides that may be present are 2′-deoxy-2′-fluoro modified nucleotides and all purine nucleotides that may be present are 2′-deoxy nucleotides except for (N N) nucleotides, which can comprise ribonucleotides, deoxynucleotides, universal bases, or other chemical modifications described herein. A modified internucleotide linkage, such as a phosphorothioate, phosphorodithioate or other modified internucleotide linkage as described herein, shown as “s”, optionally connects the (N N) nucleotides in the antisense strand. The antisense strand of constructs A-F comprise sequence complementary to any target nucleic acid sequence of the invention. Furthermore, when a glyceryl moiety (L) is present at the 3′-end of the antisense strand for any construct shown in FIG. 4 A-F, the modified internucleotide linkage is optional.

[0313] FIG. 19 shows non-limiting examples of specific chemically modified siNA sequences of the invention. A-F applies the chemical modifications described in FIG. 18A-F to a representative siNA sequence targeting the hepatitis C virus (HCV). However, such chemical modifications can be applied to any target sequence contemplated by the instant invention (see for example target sequences referred to by accession number in McSwiggen et al., International PCT publication No. WO 03/74654.

[0314] FIG. 20 shows non-limiting examples of different siNA constructs of the invention. The examples shown (constructs 1, 2, and 3) have 19 representative base pairs; however, different embodiments of the invention include any number of base pairs described herein. Bracketed regions represent nucleotide overhangs, for example comprising about 1, 2, 3, or 4 nucleotides in length when present, preferably about 2 nucleotides. Such overhangs can be present or absent (i.e., blunt ends). Such blunt ends can be present on one end or both ends of the siNA molecule, for example where all nucleotides present in a siNA duplex are base paired. Constructs 1 and 2 can be used independently for RNAi activity. Construct 2 can comprise a polynucleotide or non-nucleotide linker, which can optionally be designed as a biodegradable linker. In one embodiment, the loop structure shown in construct 2 can comprise a biodegradable linker that results in the formation of construct 1 in vivo and/or in vitro. In another example, construct 3 can be used to generate construct 2 under the same principle wherein a linker is used to generate the active siNA construct 2 in vivo and/or in vitro, which can optionally utilize another biodegradable linker to generate the active siNA construct 1 in vivo and/or in vitro. As such, the stability and/or activity of the siNA constructs can be modulated based on the design of the siNA construct for use in vivo or in vitro and/or in vitro.

[0315] FIG. 21 is a diagrammatic representation of a method used to determine target sites for siNA mediated RNAi within a particular target nucleic acid sequence, such as messenger RNA. (A) A pool of siNA oligonucleotides are synthesized wherein the antisense region of the siNA constructs has complementarity to target sites across the target nucleic acid sequence, and wherein the sense region comprises sequence complementary to the antisense region of the siNA. (B) The sequences are transfected into cells. (C) Cells are selected based on phenotypic change that is associated with modulation of the target nucleic acid sequence. (D) The siNA is isolated from the selected cells and is sequenced to identify efficacious target sites within the target nucleic acid sequence.

[0316] FIG. 22 shows non-limiting examples of different stabilization chemistries (1-10) that can be used, for example, to stabilize the 3′-end of siNA sequences of the invention, including (1) [3-3′]-inverted deoxyribose; (2) deoxyribonucleotide; (3) [5′-3′]-3′-deoxyribonucleotide; (4) [5′-3′]-ribonucleotide; (5) [5′-3′]-3′-O-methyl ribonucleotide; (6) 3′-glyceryl; (7) [3′-5′]-3′-deoxyribonucleotide; (8) [3′-3′]-deoxyribonucleotide; (9) [5′-2′]-deoxyribonucleotide; and (10) [5-3′]-dideoxyribonucleotide. In addition to modified and unmodified backbone chemistries indicated in the figure, these chemistries can be combined with different backbone modifications as described herein, for example, backbone modifications having Formula I. In addition, the 2′-deoxy nucleotide shown 5′ to the terminal modifications shown can be another modified or unmodified nucleotide or non-nucleotide described herein, for example modifications having any of Formulae I-VII or any combination thereof.

[0317] FIG. 23 shows a non-limiting example of siNA mediated inhibition of VEGF-induced angiogenesis using the rat corneal model of angiogenesis. siNA targeting site 2340 of VEGFR1 RNA (shown as Sirna/RPI No. 29695/29699) were compared to inverted controls (shown as Sirna/RPI No. 29983/29984) at three different concentrations and compared to a VEGF control in which no siNA was administered.

[0318] FIG. 24 is a non-limiting example of a HBsAg screen of stabilized siNA constructs (“stab 4/5”, see Table IV) targeting HBV pregenomic RNA in HepG2 cells at 25 nM compared to untreated and matched chemistry inverted sequence controls. The siNA sense and antisense strands are shown by Sirna/RPI number (sense/antisense).

[0319] FIG. 25 is a non-limiting example of a dose response HBsAg screen of stabilized siNA constructs (“stab 4/5”, see Table IV) targeting sites 262 and 1580 of the HBV pregenomic RNA in HepG2 cells at 0.5, 5, 10 and 25 nM compared to untreated and matched chemistry inverted sequence controls. The siNA sense and antisense strands are shown by Sirna/RPI number (sense/antisense).

[0320] FIG. 26 shows a dose response comparison of two different stabilization chemistries (“stab 7/8” and “stab 7/11”, see Table IV) targeting site 1580 of the HBV pregenomic RNA in HepG2 cells at 5, 10, 25, 50 and 100 nM compared to untreated and matched chemistry inverted sequence controls. The siNA sense and antisense strands are shown by Sirna/RPI number (sense/antisense).

[0321] FIG. 27 shows a non-limiting example of a strategy used to identify chemically modified siNA constructs of the invention that are nuclease resistance while preserving the ability to mediate RNAi activity. Chemical modifications are introduced into the siNA construct based on educated design parameters (e.g., introducing 2′-modifications, base modifications, backbone modifications, terminal cap modifications etc). The modified construct in tested in an appropriate system (e.g human serum for nuclease resistance, shown, or an animal model for PK/delivery parameters). In parallel, the siNA construct is tested for RNAi activity, for example in a cell culture system such as a luciferase reporter assay). Lead siNA constructs are then identified which possess a particular characteristic while maintaining RNAi activity, and can be further modified and assayed once again. This same approach can be used to identify siNA-conjugate molecules with improved pharmacokinetic profiles, delivery, and RNAi activity.

[0322] FIG. 28 shows representative data of a chemically modified siNA construct (Stab 4/5, Table IV) targeting HBV site 1580 RNA compared to an unstabilized siRNA construct in a dose response time course HBsAg assay. The constructs were compared at different concentrations (5 nM, 10 nM, 25 nM, 50 nM, and 100 nM) over the course of nine days. Activity based on HBsAg levels was determined at day 3, day 6, and day 9.

[0323] FIG. 29 shows representative data of a chemically modified siNA construct (Stab 7/8, Table IV) targeting HBV site 1580 RNA compared to an unstabilized siRNA construct in a dose response time course HBsAg assay. The constructs were compared at different concentrations (5 nM, 10 nM, 25 nM, 50 nM, and 100 nM) over the course of nine days. SiNA activity based on HBsAg levels was determined at day 3, day 6, and day 9.

[0324] FIG. 30 shows representative data of a chemically modified siNA construct (Stab 7/11, Table IV) targeting HBV site 1580 RNA compared to an unstabilized siRNA construct in a dose response time course HBsAg assay. The constructs were compared at different concentrations (5 nM, 10 nM, 25 nM, 50 nM, and 100 nM) over the course of nine days. SiNA activity based on HBsAg levels was determined at day 3, day 6, and day 9.

[0325] FIG. 31 shows representative data of a chemically modified siNA construct (Stab 9/10, Table IV) targeting HBV site 1580 RNA compared to an unstabilized siRNA construct in a dose response time course HBsAg assay. The constructs were compared at different concentrations (5 nM, 10 nM, 25 nM, 50 nM, and 100 nM) over the course of nine days. SiNA activity based on HBsAg levels was determined at day 3, day 6, and day 9.

[0326] FIG. 32 shows non-limiting examples of inhibition of viral replication of a HCV/poliovirus chimera by siNA constructs targeted to HCV chimera (29579/29586; 29578/29585) compared to control (29593/29600).

[0327] FIG. 33 shows a non-limiting example of a dose response study demonstrating the inhibition of viral replication of a HCV/poliovirus chimera by siNA construct (29579/29586) at various concentrations (1 nM, 5 nM, 10 nM, and 25 nM) compared to control (29593/29600).

[0328] FIG. 34 shows a non-limiting example demonstrating the inhibition of viral replication of a HCV/poliovirus chimera by a chemically modified siRNA construct (30051/30053) compared to control construct (30052/30054).

[0329] FIG. 35 shows a non-limiting example demonstrating the inhibition of viral replication of a HCV/poliovirus chimera by a chemically modified siRNA construct (30055/30057) compared to control construct (30056/30058).

[0330] FIG. 36 shows a non-limiting example of several chemically modified siRNA constructs targeting viral replication of an HCV/poliovirus chimera at 10 nM treatment in comparison to a lipid control and an inverse siNA control construct 29593/29600.

[0331] FIG. 37 shows a non-limiting example of several chemically modified siRNA constructs targeting viral replication of a HCV/poliovirus chimera at 25 nM treatment in comparison to a lipid control and an inverse siNA control construct 29593/29600.

[0332] FIG. 38 shows a non-limiting example of several chemically modified siRNA constructs targeting viral replication of a Huh7 HCV replicon system at 25 nM treatment in comparison to untreated cells (“cells”), cells transfected with lipofectamine (“LFA2K”) and inverse siNA control constructs.

[0333] FIG. 39 shows a non-limiting example of a dose response study using chemically modified siNA molecules (Stab 4/5, see Table IV) targeting HCV RNA sites 291, 300, and 303 in a Huh7 HCV replicon system at 5, 10, 25, and 100 nM treatment comparison to untreated cells (“cells”), cells transfected with lipofectamine (“LFA”) and inverse siNA control constructs.

[0334] FIG. 40 shows a non-limiting example of several chemically modified siNA constructs (Stab 7/8, see Table IV) targeting viral replication in a Huh7 HCV replicon system at 25 nM treatment in comparison to untreated cells (“cells”), cells transfected with lipofectamine (“Lipid”) and inverse siNA control constructs.

[0335] FIG. 41 shows a non-limiting example of a dose response study using chemically modified siNA molecules (Stab 7/8, see Table IV) targeting HCV site 327 in a Huh7 HCV replicon system at 5, 10, 25, 50, and 100 nM treatment in comparison to inverse siNA control constructs.

[0336] FIG. 42 shows a synthetic scheme for post-synthetic modification of a nucleic acid molecule to produce a folate conjugate.

[0337] FIG. 43 shows a synthetic scheme for generating an oligonucleotide or nucleic acid-folate conjugate.

[0338] FIG. 44 shows an alternative synthetic scheme for generating an oligonucleotide or nucleic acid-folate conjugate.

[0339] FIG. 45 shows an alternative synthetic scheme for post-synthetic modification of a nucleic acid molecule to produce a folate conjugate.

[0340] FIG. 46 shows a non-limiting example of a synthetic scheme for the synthesis of a N-acetyl-D-galactosamine-2′-aminouridine phosphoramidite conjugate of the invention.

[0341] FIG. 47 shows a non-limiting example of a synthetic scheme for the synthesis of a N-acetyl-D-galactosamine-D-threoninol phosphoramidite conjugate of the invention.

[0342] FIG. 48 shows a non-limiting example of a N-acetyl-D-galactosamine siNA nucleic acid conjugate of the invention. W shown in the example refers to a biodegradable linker, for example a nucleic acid dimer, trimer, or tetramer comprising ribonucleotides and/or deoxyribonucleotides. The siNA can be conjugated at the 3′, 5′ or both 3′ and 5′ ends of the sense strand of a double stranded siNA and/or the 3′-end of the antisense strand of the siNA. A single stranded siNA molecule can be conjugated at the 3′-end of the siNA.

[0343] FIG. 49 shows a non-limiting example of a synthetic scheme for the synthesis of a dodecanoic acid derived conjugate linker of the invention.

[0344] FIG. 50 shows a non-limiting example of a synthetic scheme for the synthesis of an oxime linked nucleic acid/peptide conjugate of the invention.

[0345] FIG. 51 shows non-limiting examples of phospholipid derived siNA conjugates of the invention. CL shown in the examples refers to a biodegradable linker, for example a nucleic acid dimer, trimer, or tetramer comprising ribonucleotides and/or deoxyribonucleotides. The siNA can be conjugated at the 3′, 5′ or both 3′ and 5′ ends of the sense strand of a double stranded siNA and/or the 3′-end of the antisense strand of the siNA. A single stranded siNA molecule can be conjugated at the 3′-end of the siNA.

[0346] FIG. 52 shows a non-limiting example of a synthetic scheme for preparing a phospholipid derived siNA conjugates of the invention.

[0347] FIG. 53 shows a non-limiting example of a synthetic scheme for preparing a poly-N-acetyl-D-galactosamine nucleic acid conjugate of the invention.

[0348] FIG. 54 shows a non-limiting example of the synthesis of siNA cholesterol conjugates of the invention using a phosphoramidite approach.

[0349] FIG. 55 shows a non-limiting example of the synthesis of siNA PEG conjugates of the invention using NHS ester coupling.

[0350] FIG. 56 shows a non-limiting example of the synthesis of siNA cholesterol conjugates of the invention using NHS ester coupling.

[0351] FIG. 57 shows a non-limiting example of various siNA cholesterol conjugates of the invention.

[0352] FIG. 58 shows a non-limiting example of various siNA cholesterol conjugates of the invention in which various linker chemistries and/or cleavable linkers can be utilized at different positions of a double stranded siNA molecule.

[0353] FIG. 59 shows a non-limiting example of various siNA cholesterol conjugates of the invention in which various linker chemistries and/or cleavable linkers can be utilized at different positions of a double stranded siNA molecule.

[0354] FIG. 60 shows a non-limiting example of various siNA cholesterol conjugates of the invention in which various linker chemistries and/or cleavable linkers can be utilized at different positions of a single stranded siNA molecule.

[0355] FIG. 61 shows a non-limiting example of various siNA phospholipid conjugates of the invention in which various linker chemistries and/or cleavable linkers can be utilized at different positions of a double stranded siNA molecule.

[0356] FIG. 62 shows a non-limiting example of various siNA phospholipid conjugates of the invention in which various linker chemistries and/or cleavable linkers can be utilized at different positions of a single stranded siNA molecule.

[0357] FIG. 63 shows a non-limiting example of various siNA galactosamine conjugates of the invention in which various linker chemistries and/or cleavable linkers can be utilized at different positions of a double stranded siNA molecule.

[0358] FIG. 64 shows a non-limiting example of various siNA galactosamine conjugates of the invention in which various linker chemistries and/or cleavable linkers can be utilized at different positions of a single stranded siNA molecule.

[0359] FIG. 65 shows a non-limiting example of various generalized siNA conjugates of the invention in which various linker chemistries and/or cleavable linkers can be utilized at different positions of a double stranded siNA molecule. CONJ in the figure refers to any biologically active compound or any other conjugate compound as described herein and in the Formulae herein.

[0360] FIG. 66 shows a non-limiting example of various generalized siNA conjugates of the invention in which various linker chemistries and/or cleavable linkers can be utilized at different positions of a single stranded siNA molecule. CONJ in the figure refers to any biologically active compound or any other conjugate compound as described herein and in the Formulae herein.

[0361] FIG. 67 shows a non-limiting example of the pharmacokinetic distribution of intact siNA in liver after administration of conjugated or unconjugated siNA molecules in mice.

[0362] FIG. 68 shows a non-limiting example of the activity of conjugated siNA constructs compared to matched chemistry unconjugated siNA constructs in a HBV cell culture system without the use of transfection lipid. As shown in the Figure, siNA conjugates provide efficacy in cell culture without the need for transfection reagent.

[0363] FIG. 69 shows a non-limiting example of a scheme for the synthesis of a mono-galactosamine phosphoramidite of the invention that can be used to generate galactosamine conjugated nucleic acid molecules.

[0364] FIG. 70 shows a non-limiting example of a scheme for the synthesis of a tri-galactosamine phosphoramidite of the invention that can be used to generate tri-galactosamine conjugated nucleic acid molecules.

[0365] FIG. 71 shows a non-limiting example of a scheme for the synthesis of another tri-galactosamine phosphoramidite of the invention that can be used to generate tri-galactosamine conjugated nucleic acid molecules.

[0366] FIG. 72 shows a non-limiting example of an alternate scheme for the synthesis of a tri-galactosamine phosphoramidite of the invention that can be used to generate tri-galactosamine conjugated nucleic acid molecules.

[0367] FIG. 73 shows a non-limiting example of a scheme for the synthesis of a cholesterol NHS ester of the invention that can be used to generate cholesterol conjugated nucleic acid molecules.

[0368] FIG. 74 shows non-limiting examples of phosphorylated siNA molecules of the invention, including linear and duplex constructs and asymmetric derivatives thereof.

[0369] FIG. 75 shows non-limiting examples of a chemically modified terminal phosphate groups of the invention.

[0370] FIG. 76 shows a non-limiting example of inhibition of VEGF induced neovascularization in the rat corneal model. VEGFr1 site 349 active siNA having “Stab 9/10” chemistry (Sirna # 31270/31273) was tested for inhibition of VEGF-induced angiogenesis at three different concentrations (2.0 ug, 1.0 ug, and 0.1 μg dose response) as compared to a matched chemistry inverted control siNA construct (Sirna # 31276/31279) at each concentration and a VEGF control in which no siNA was administered. As shown in the figure, the active siNA construct having “Stab 9/10” chemistry (Sirna # 31270/31273) is highly effective in inhibiting VEGF-induced angiogenesis in the rat corneal model compared to the matched chemistry inverted control siNA at concentrations from 0.1 μg to 2.0 ug.

[0371] FIG. 77 shows activity of modified siNA constructs having stab 4/5 (Sirna 30355/30366), stab 7/8 (Sirna 30612/30620), and stab 7/11 (Sirna 30612/31175) chemistries and an all ribo siNA construct (Sirna 30287/30298) in the reduction of HBsAg levels compared to matched inverted controls at A. 3 days, B. 9 days, and C. 21 days post transfection. Also shown is the corresponding percent inhibition as function of time at siNA concentrations of D. 100 nM, E. 50 nM, and F. 25 nM.

[0372] FIG. 78 shows non-limiting examples of phosphorylated siNA molecules of the invention, including linear and duplex constructs and asymmetric derivatives thereof.

[0373] FIG. 79 shows non-limiting examples of chemically modified terminal phosphate groups of the invention.

[0374] FIG. 80 shows a non-limiting example of reduction of serum HBV DNA in mice treated with hydrodynamically administered chemically modified siNA (Stab 7/8 and Stab 9/10) targeting HBV RNA compared to matched chemistry inverted controls and a saline control.

[0375] FIG. 81 shows a non-limiting example of reduction of serum HBV S antigen (HBsAg) in mice treated with hydrodynamically administered chemically modified siNA (Stab 7/8 and Stab 9/10) targeting HBV RNA compared to matched chemistry inverted controls and a saline control.

[0376] FIG. 82 shows a non-limiting example of reduction of serum HBV RNA in mice treated with hydrodynamically administered chemically modified siNA (Stab 7/8 and Stab 9/10) targeting HBV RNA compared to matched chemistry inverted controls and a saline control.

[0377] FIG. 83 shows a non-limiting example of reduction of serum HBV DNA in mice treated with hydrodynamically administered chemically modified siNA (Stab 7/8 and Stab 9/10) targeting HBV RNA at 5 days and 7 days post administration.

[0378] FIG. 84 shows a non-limiting example of an assay for dose dependent reduction of Luciferase expression utilizing Stab 7/8 chemically modified siNA constructs targeting luciferase RNA sites 80, 237, and 1478 that were selected from a screen using all Stab 7/8 chemically modified siNA constructs.

[0379] FIG. 85 shows a non-limiting example of an assay for dose dependent reduction of Luciferase expression utilizing Stab 7/8 chemically modified siNA constructs targeting luciferase RNA sites 1544 and 1607 that were selected from a screen using all Stab 7/8 chemically modified siNA constructs.

[0380] FIG. 86 shows a non-limiting example of an assay screen of Stab 7/8 siNA constructs targeting various sites of HCV RNA in a replicon system compared to untreated, lipid, and an inverted control. As shown in the figure, several Stab 7/8 constructs were identified with potent anti-HCV activity as shown by reduction in HCV RNA levels.

[0381] FIG. 87 shows a non-limiting example of an assay screen of Stab 7/8 siNA constructs targeting various sites of HBV RNA in HEpG2 cells compared to untreated cells and an inverted control. As shown in the figure, several Stab 7/8 constructs were identified with potent anti-HBV activity as shown by reduction in HBV S antigen levels.

[0382] FIG. 88 shows a non-limiting example of an assay screen of various combinations of chemically modified siNA constructs (e.g., Stab 7/8, 7/10, 7/11, 9/8, and 9/10) targeting site 1580 of HBV RNA in HEpG2 cells compared to untreated cells and an matched chemistry inverted controls. As shown in the figure, the combination chemistries tested demonstrated potent anti-HBV activity as shown by reduction in HBV S antigen levels.

[0383] FIG. 89 shows a non-limiting example of an assay screen of various combinations of chemically modified siNA constructs (e.g., Stab 7/8, 9/10, 6/10, 16/8, 16/10, 18/8, and 18/10) targeting site 1580 of HBV RNA in HEpG2 cells compared to untreated cells and an matched chemistry inverted controls. As shown in the figure, the combination chemistries tested demonstrated potent anti-HBV activity as shown by reduction in HBV S antigen levels.

[0384] FIG. 90 shows a non-limiting example of an assay screen of various combinations of chemically modified siNA constructs (e.g., Stab 4/8, 4/10, 7/5, 7/10, 9/5, 9/8, and 9/11) targeting site 1580 of HBV RNA in HEpG2 cells compared to untreated cells and an matched chemistry inverted controls. As shown in the figure, the combination chemistries tested demonstrated potent anti-HBV activity as shown by reduction in HBV S antigen levels.

[0385] FIG. 91 shows a non-limiting example of reduction of serum HBV DNA in mice treated with hydrodynamically administered polyethylimine-polyethyleneglycol-tri-N-acetylgalactosamine (PEI-PEG-triGAL) formulated Stab 9/10 siNA targeting HBV site 1580 RNA compared to a matched chemistry inverted control.

[0386] FIG. 92 shows a non-limiting example of reduction of serum HBsAg in mice treated with hydrodynamically administered polyethylimine-polyethyleneglycol-tri-N-acetylgalactosamine (PEI-PEG-triGAL) formulated Stab 9/10 siNA targeting HBV site 1580 RNA compared to a matched chemistry inverted control.

[0387] FIG. 93 shows a non-limiting example of the general structure of a polyethylimine-polyethyleneglycol-tri-N-acetylgalactosamine (PEI-PEG-triGAL) transfection agent.

[0388] FIG. 94A shows a non-limiting example of methodology used to design self complementary DFO constructs utilizing palindrome and/or repeat nucleic acid sequences that are identified in a target nucleic acid sequence. (i) A palindrome or repeat sequence is identified in a nucleic acid target sequence. (ii) A sequence is designed that is complementary to the target nucleic acid sequence and the palindrome sequence. (iii) An inverse repeat sequence of the non-palindrome/repeat portion of the complementary sequence is appended to the 3′-end of the complementary sequence to generate a self complementary DFO molecule comprising sequence complementary to the nucleic acid target. (iv) The DFO molecule can self-assemble to form a double stranded oligonucleotide. FIG. 94B shows a non-limiting representative example of a duplex forming oligonucleotide sequence. FIG. 94C shows a non-limiting example of the self assembly schematic of a representative duplex forming oligonucleotide sequence. FIG. 94D shows a non-limiting example of the self assembly schematic of a representative duplex forming oligonucleotide sequence followed by interaction with a target nucleic acid sequence resulting in modulation of gene expression.

[0389] FIG. 95 shows a non-limiting example of the design of self complementary DFO constructs utilizing palindrome and/or repeat nucleic acid sequences that are incorporated into the DFO constructs that have sequence complementary to any target nucleic acid sequence of interest. Incorporation of these palindrome/repeat sequences allow the design of DFO constructs that form duplexes in which each strand is capable of mediating modulation of target gene expression, for example by RNAi. First, the target sequence is identified. A complementary sequence is then generated in which nucleotide or non-nucleotide modifications (shown as X or Y) are introduced into the complementary sequence that generate an artificial palindrome (shown as XYXYXY in the Figure). An inverse repeat of the non-palindrome/repeat complementary sequence is appended to the 3′-end of the complementary sequence to generate a self complementary DFO comprising sequence complementary to the nucleic acid target. The DFO can self-assemble to form a double stranded oligonucleotide.

[0390] FIG. 96 shows non-limiting examples of multifunctional siNA molecules of the invention comprising two separate polynucleotide sequences that are each capable of mediating RNAi directed cleavage of differing target nucleic acid sequences. FIG. 96A shows a non-limiting example of a multifunctional siNA molecule having a first region that is complementary to a first target nucleic acid sequence (complementary region 1) and a second region that is complementary to a second target nucleic acid sequence (complementary region 2), wherein the first and second complementary regions are situated at the 3′-ends of each polynucleotide sequence in the multifunctional siNA. The dashed portions of each polynucleotide sequence of the multifunctional siNA construct have complementarity with regard to corresponding portions of the siNA duplex, but do not have complementarity to the target nucleic acid sequences. FIG. 96B shows a non-limiting example of a multifunctional siNA molecule having a first region that is complementary to a first target nucleic acid sequence (complementary region 1) and a second region that is complementary to a second target nucleic acid sequence (complementary region 2), wherein the first and second complementary regions are situated at the 5′-ends of each polynucleotide sequence in the multifunctional siNA. The dashed portions of each polynucleotide sequence of the multifunctional siNA construct have complementarity with regard to corresponding portions of the siNA duplex, but do not have complementarity to the target nucleic acid sequences.

[0391] FIG. 97 shows non-limiting examples of multifunctional siNA molecules of the invention comprising a single polynucleotide sequence comprising distinct regions that are each capable of mediating RNAi directed cleavage of differing target nucleic acid sequences. FIG. 97A shows a non-limiting example of a multifunctional siNA molecule having a first region that is complementary to a first target nucleic acid sequence (complementary region 1) and a second region that is complementary to a second target nucleic acid sequence (complementary region 2), wherein the second complementary region is situated at the 3′-end of the polynucleotide sequence in the multifunctional siNA. The dashed portions of each polynucleotide sequence of the multifunctional siNA construct have complementarity with regard to corresponding portions of the siNA duplex, but do not have complementarity to the target nucleic acid sequences. FIG. 97B shows a non-limiting example of a multifunctional siNA molecule having a first region that is complementary to a first target nucleic acid sequence (complementary region 1) and a second region that is complementary to a second target nucleic acid sequence (complementary region 2), wherein the first complementary region is situated at the 5′-end of the polynucleotide sequence in the multifunctional siNA. The dashed portions of each polynucleotide sequence of the multifunctional siNA construct have complementarity with regard to corresponding portions of the siNA duplex, but do not have complementarity to the target nucleic acid sequences. In one embodiment, these multifunctional siNA constructs are processed in vivo or in vitro to generate multifunctional siNA constructs as shown in FIG. 96.

[0392] FIG. 98 shows non-limiting examples of multifunctional siNA molecules of the invention comprising two separate polynucleotide sequences that are each capable of mediating RNAi directed cleavage of differing target nucleic acid sequences and wherein the multifunctional siNA construct further comprises a self complementary, palindrome, or repeat region, thus enabling shorter bifunctional siNA constructs that can mediate RNA interference against differing target nucleic acid sequences. FIG. 98A shows a non-limiting example of a multifunctional siNA molecule having a first region that is complementary to a first target nucleic acid sequence (complementary region 1) and a second region that is complementary to a second target nucleic acid sequence (complementary region 2), wherein the first and second complementary regions are situated at the 3′-ends of each polynucleotide sequence in the multifunctional siNA, and wherein the first and second complementary regions further comprise a self complementary, palindrome, or repeat region. The dashed portions of each polynucleotide sequence of the multifunctional siNA construct have complementarity with regard to corresponding portions of the siNA duplex, but do not have complementarity to the target nucleic acid sequences. FIG. 98B shows a non-limiting example of a multifunctional siNA molecule having a first region that is complementary to a first target nucleic acid sequence (complementary region 1) and a second region that is complementary to a second target nucleic acid sequence (complementary region 2), wherein the first and second complementary regions are situated at the 5′-ends of each polynucleotide sequence in the multifunctional siNA, and wherein the first and second complementary regions further comprise a self complementary, palindrome, or repeat region. The dashed portions of each polynucleotide sequence of the multifunctional siNA construct have complementarity with regard to corresponding portions of the siNA duplex, but do not have complementarity to the target nucleic acid sequences.

[0393] FIG. 99 shows non-limiting examples of multifunctional siNA molecules of the invention comprising a single polynucleotide sequence comprising distinct regions that are each capable of mediating RNAi directed cleavage of differing target nucleic acid sequences and wherein the multifunctional siNA construct further comprises a self complementary, palindrome, or repeat region, thus enabling shorter bifunctional siNA constructs that can mediate RNA interference against differing target nucleic acid sequences. FIG. 99A shows a non-limiting example of a multifunctional siNA molecule having a first region that is complementary to a first target nucleic acid sequence (complementary region 1) and a second region that is complementary to a second target nucleic acid sequence (complementary region 2), wherein the second complementary region is situated at the 3′-end of the polynucleotide sequence in the multifunctional siNA, and wherein the first and second complementary regions further comprise a self complementary, palindrome, or repeat region. The dashed portions of each polynucleotide sequence of the multifunctional siNA construct have complementarity with regard to corresponding portions of the siNA duplex, but do not have complementarity, to the target nucleic acid sequences. FIG. 99B shows a non-limiting example of a multifunctional siNA molecule having a first region that is complementary to a first target nucleic acid sequence (complementary region 1) and a second region that is complementary to a second target nucleic acid sequence (complementary region 2), wherein the first complementary region is situated at the 5′-end of the polynucleotide sequence in the multifunctional siNA, and wherein the first and second complementary regions further comprise a self complementary, palindrome, or repeat region. The dashed portions of each polynucleotide sequence of the multifunctional siNA construct have complementarity with regard to corresponding portions of the siNA duplex, but do not have complementarity to the target nucleic acid sequences. In one embodiment, these multifunctional siNA constructs are processed in vivo or in vitro to generate multifunctional siNA constructs as shown in FIG. 98.

[0394] FIG. 100 shows a non-limiting example of how multifunctional siNA molecules of the invention can target two separate target nucleic acid molecules, such as separate RNA molecules encoding differing proteins, for example a cytokine and its corresponding receptor, differing viral strains, a virus and a cellular protein involved in viral infection or replication, or differing proteins involved in a common or divergent biologic pathway that is implicated in the maintenance of progression of disease. Each strand of the multifunctional siNA construct comprises a region having complementarity to separate target nucleic acid molecules. The multifunctional siNA molecule is designed such that each strand of the siNA can be utilized by the RISC complex to initiate RNA interference mediated cleavage of its corresponding target. These design parameters can include destabilization of each end of the siNA construct (see for example Schwarz et al., 2003, Cell, 115, 199-208). Such destabilization can be accomplished for example by using guanosine-cytidine base pairs, alternate base pairs (e.g., wobbles), or destabilizing chemically modified nucleotides at terminal nucleotide positions as is known in the art.

[0395] FIG. 101 shows a non-limiting example of how multifunctional siNA molecules of the invention can target two separate target nucleic acid sequences within the same target nucleic acid molecule, such as alternate coding regions of a RNA, coding and non-coding regions of a RNA, or alternate splice variant regions of a RNA. Each strand of the multifunctional siNA construct comprises a region having complementarity to the separate regions of the target nucleic acid molecule. The multifunctional siNA molecule is designed such that each strand of the siNA can be utilized by the RISC complex to initiate RNA interference mediated cleavage of its corresponding target region. These design parameters can include destabilization of each end of the siNA construct (see for example Schwarz et al, 2003, Cell, 115, 199-208). Such destabilization can be accomplished for example by using guanosine-cytidine base pairs, alternate base pairs (e.g., wobbles), or destabilizing chemically modified nucleotides at terminal nucleotide positions as is known in the art.

[0396] FIG. 102 shows a non-limiting example of the dose dependent reduction in serum HBV DNA levels following systemic intravenous administration of a Stab 7/8 siNA construct targeting HBV RNA site 263 in mice pre-treated with a HBV expressing vector via hydrodynamic injection. siNA treated groups were compared to inverted control or saline groups. A statistically significant (P<0.01) reduction of 0.93 log was observed in the 30 mg/kg group as compared to the saline group. This result demonstrates in vivo activity of a systemically administered siNA.

[0397] FIG. 103 shows activity of a fully stabilized siNA construct compared to a matched chemistry inverted control, an all RNA siNA construct having identical sequence (RNA active), and a corresponding all RNA inverted control (RNA Inv), in a HBV Co-HDI mouse model. A hydrodynamic tail vein injection (HDI) containing 1 ug of the pWTD HBV vector and 0, 0.03, 0.1, 0.3 or 1.0 ug of siNA was performed on C57BL/J6 mice. Active siNA duplexes and inverted sequence controls in both native RNA and stabilized chemistry were tested. The levels of serum HBV DNA and HBsAg were measured 72 hrs post injection. FIG. 103A shows results for HBV serum DNA levels, FIG. 103B shows results for serum HBsAg levels, and FIG. 103C shows results for liver HBV RNA levels in this study.

[0398] FIG. 104 shows non-limiting examples of the design of self complementary DFO constructs utilizing palindrome and/or repeat nucleic acid sequences that are incorporated into the DFO constructs that have sequence complementary to any target nucleic acid sequence of interest as described in FIG. 95. The palindrome/repeat sequence comprises chemically modified nucleotides that are able to interact with a portion of the target nucleic acid sequence (e.g., use of modified base analogs that can form Watson Crick base pairs or non-Watson Crick base pairs such as 2-aminopurine or 2-amino-1,6-dihydropurine nucleotides or universal nucleotides).

[0399] FIG. 105 shows non-limiting examples of inhibition of VEGFR1 RNA expression using DFO molecules of the invention. Duplex DFO constructs prepared from compound numbers 32808, 32809, 32810, 32811, and 32812 were assayed along with siNA molecules having known activity against VEGFR1 RNA (compound numbers 32748/32755, 33282/32289, 31270/31273), matched chemistry inverted controls (compound numbers 32772/32779, 32296/32303, 31276/31279), and a transfection agent control (LF2K). As shown in the Figure, the self complementary DFO sequence 32812 shows potent inhibition of VEGFR1 RNA. Sequences for compound numbers are shown in Table I.

[0400] FIG. 106 shows non-limiting examples of inhibition of HBV RNA expression using DFO molecules of the invention as assayed by HBsAg levels. A duplex DFO construct prepared from compound 32221 and a hairpin formed with the same sequence (32221 fold) was assayed along with a siNA construct having known activity against HBV RNA (compound number 31335/31337), a matched chemistry inverted control (compound number 31336/31338), and untreated cells (Untreated). As shown in the Figure, the self complementary DFO sequence 32221 shows significant inhibition of HBV HBsAg as a duplex. Sequences for compound numbers are shown in Table I.

[0401] FIG. 107 shows a non-limiting example of the results obtained from using a method to determine the probability of the occurrence of various palindromes ranging from 6 nucleotides to 14 nucleotides in an artificially generated 200K-gene sequence. The simulation revealed that 6-mer palindromes typically occur once for every given 64-nucleotide sequence. An 8-mer palindrome was found to occur once for every 250-nucleotide sequence. These calculated frequencies matched well with the observed frequencies of palindrome in defined target sequences. This allowed the estimation that approximately 78 6-mer palindromes should exist on average in any given 5K gene.

[0402] FIG. 108 shows a non-limiting example of a study used to determine the presence of 6-mer palindromes in various genes, including Luc2, TGB-beta receptor-1, VEGF, VEGFR1, VEGFR2, HIVNL23, vaccinia, and HCV, which resulted in a large number of palindromic sites identified in each gene sequence. This algorithm considered only the Watson-Crick base pairs and excluded the presence of any mismatched and wobble base pairs. The inclusion of mismatches, wobble pairs and non-Watson-Crick base pairs can result in a large number of semi-palindromic sites suitable for the design of additional minimal duplex forming oligonucleotides.

[0403] FIG. 109 shows a non-limiting example of DFO mediated reduction of TGF-beta receptor-1 target RNA expression. Self complementary DFO palindrome/repeat sequences shown in Table I (e.g., compound # 35038, 35041, 35044, and 35045) were designed against TGF-beta receptor-1 RNA targets and were screened in cell culture experiments and irrelevant controls (Control 1, Control 2) and untreated cells along with a transfection control (LF2K). NMuMg cells were transfected with 0.5 uL/well of lipid complexed with 25 and 100 nM DFO. Cells were incubated at 37° for 24 h in the continued presence of the DFO transfection mixture. At 24 h, RNA was prepared from each well of treated cells. The supernatants with the transfection mixtures were first removed and discarded, then the cells were lysed and RNA prepared from each well. Target gene expression following treatment was evaluated by RT-PCR for the TGF-beta receptor mRNA and for a control gene (36B4, an RNA polymerase subunit) for normalization. As shown in the figure, the DFO constructs displayed potent inhibition of TGF-beta receptor-1 RNA expression in this system.

[0404] FIG. 110 shows a non-limiting example inhibition of HBV RNA using multifunctional siNA constructs targeting HBV and PKC-alpha RNA in HepG2 cells.

[0405] FIG. 111 shows a non-limiting example inhibition of PKC-alpha RNA using multifunctional siNA constructs targeting HBV and PKC-alpha RNA in HepG2 cells.

[0406] FIG. 112(A-H) shows non-limiting examples of tethered multifunctional siNA constructs of the invention. In the examples shown, a linker (e.g., nucleotide or non-nucleotide linker) connects two siNA regions (e.g., two sense, two antisense, or alternately a sense and an antisense region together. Separate sense (or sense and antisense) sequences corresponding to a first target sequence and second target sequence are hybridized to their corresponding sense and/or antisense sequences in the multifunctional siNA. In addition, various conjugates, ligands, aptamers, polymers or reporter molecules can be attached to the linker region for selective or improved delivery and/or pharmacokinetic properties.

[0407] FIG. 113 shows a non-limiting example of various dendrimer based multifunctional siNA designs.

[0408] FIG. 114 shows a non-limiting example of various supramolecular multifunctional siNA designs.

[0409] FIG. 115 shows a non-limiting example of a dicer enabled multifunctional siNA design using a 30 nucleotide precursor siNA construct. A 30 base pair duplex is cleaved by Dicer into 22 and 8 base pair products from either end (8 b.p. fragments not shown). For ease of presentation the overhangs generated by dicer are not shown—but can be compensated for. Three targeting sequences are shown. The required sequence identity overlapped is indicated by grey boxes. The N's of the parent 30 b.p. siNA are suggested sites of 2′-OH positions to enable Dicer cleavage if this is tested in stabilized chemistries. Note that processing of a 30mer duplex by Dicer RNase III does not give a precise 22+8 cleavage, but rather produces a series of closely related products (with 22+8 being the primary site). Therefore, processing by Dicer will yield a series of active siNAs.

[0410] FIG. 116 shows a non-limiting example of a dicer enabled multifunctional siNA design using a 40 nucleotide precursor siNA construct. A 40 base pair duplex is cleaved by Dicer into 20 base pair products from either end. For ease of presentation the overhangs generated by dicer are not shown—but can be compensated for. Four targeting sequences are shown in four colors, blue, light-blue and red and orange. The required sequence identity overlapped is indicated by grey boxes. This design format can be extended to larger RNAs. If chemically stabilized siNAs are bound by Dicer, then strategically located ribonucleotide linkages can enable designer cleavage products that permit our more extensive repertoire of multifunctional designs. For example cleavage products not limited to the Dicer standard of approximately 22-nucleotides can allow multifunctional siNA constructs with a target sequence identity overlap ranging from, for example, about 3 to about 15 nucleotides.

[0411] FIG. 117 shows a non-limiting example of inhibition of HBV RNA by dicer enabled multifunctional siNA constructs targeting HBV site 263. When the first 17 nucleotides of a siNA antisense strand (e.g., 21 nucleotide strands in a duplex with 3′-TT overhangs) are complementary to a target RNA, robust silencing was observed at 25 nM. 80% silencing was observed with only 16 nucleotide complementarity in the same format.

[0412] FIG. 118 shows a non-limiting example of additional multifunctional siNA construct designs of the invention. In one example, a conjugate, ligand, aptamer, label, or other moiety is attached to a region of the multifunctional siNA to enable improved delivery or pharmacokinetic profiling.

[0413] FIG. 119 shows a non-limiting example of additional multifunctional siNA construct designs of the invention. In one example, a conjugate, ligand, aptamer, label, or other moiety is attached to a region of the multifunctional siNA to enable improved delivery or pharmacokinetic profiling.

[0414] FIG. 120 shows a non-limiting example of an experiment designed to determine the effect of absolute based paired sequence length of siNA constructs on RNAi efficacy. A well characterized site for siNA mediated inhibition, HBV RNA site 263 was chosen and siNA molecules ranging in length from 19 to 39 ribonucleotide base pairs in length with 3′-terminal dinucleotide TT overhangs. Transfection of the human hepatocellular carcinoma cell line, Hep G2, with replication-competent HBV DNA results in the expression of HBV proteins and the production of virions. To test the efficacy of differing length siNAs targeted against HBV RNA, several siNA duplexes targeting site 263 within HBV pregenomic RNA were co-transfected with HBV genomic DNA once at 25 nM with lipid at 12.5 ug/ml into Hep G2 cells, and the subsequent levels of HBV RNA analyzed by RT PCR compared to cells treated with an inverted siNA control to site 263 and untreated cells. As shown in the figure, the siNA constructs from 19 to 39 base pairs were all efficacious in inhibiting HBV RNA in this system.

### DETAILED DESCRIPTION OF THE INVENTION

Mechanism of Action of Nucleic Acid Molecules of the Invention

[0415] The discussion that follows discusses the proposed mechanism of RNA interference mediated by short interfering RNA as is presently known, and is not meant to be limiting and is not an admission of prior art. Applicant demonstrates herein that chemically-modified short interfering nucleic acids possess similar or improved capacity to mediate RNAi as do siRNA molecules and are expected to possess improved stability and activity in vivo; therefore, this discussion is not meant to be limited to siRNA only and can be applied to siNA as a whole. By “improved capacity to mediate RNAi” or “improved RNAi activity” is meant to include RNAi activity measured in vitro and/or in vivo where the RNAi activity is a reflection of both the ability of the siNA to mediate RNAi and the stability of the siNAs of the invention. In this invention, the product of these activities can be increased in vitro and/or in vivo compared to an all RNA siRNA or a siNA containing a plurality of ribonucleotides. In some cases, the activity or stability of the siNA molecule can be decreased (i.e., less than ten-fold), but the overall activity of the siNA molecule is enhanced in vitro and/or in vivo.

[0416] RNA interference refers to the process of sequence specific post-transcriptional gene silencing in animals mediated by short interfering RNAs (siRNAs) (Zamore et al., 2000, Cell, 101, 25-33; Fire et al., 1998, Nature, 391, 806). The corresponding process in plants is commonly referred to as post-transcriptional gene silencing or RNA silencing and is also referred to as quelling in fungi. The process of post-transcriptional gene silencing is thought to be an evolutionarily-conserved cellular defense mechanism used to prevent the expression of foreign genes which is commonly shared by diverse flora and phyla (Fire et al., 1999, Trends Genet., 15, 358). Such protection from foreign gene expression may have evolved in response to the production of double-stranded RNAs (dsRNAs) derived from viral infection or the random integration of transposon elements into a host genome via a cellular response that specifically destroys homologous single-stranded RNA or viral genomic RNA. The presence of dsRNA in cells triggers the RNAi response though a mechanism that has yet to be fully characterized. This mechanism appears to be different from the interferon response that results from dsRNA-mediated activation of protein kinase PKR and 2′,5′-oligoadenylate synthetase resulting in non-specific cleavage of mRNA by ribonuclease L.

[0417] The presence of long dsRNAs in cells stimulates the activity of a ribonuclease III enzyme referred to as Dicer. Dicer is involved in the processing of the dsRNA into short pieces of dsRNA known as short interfering RNAs (siRNAs) (Berstein et al., 2001, Nature, 409, 363). Short interfering RNAs derived from Dicer activity are typically about 21 to about 23 nucleotides in length and comprise about 19 base pair duplexes. Dicer has also been implicated in the excision of 21- and 22-nucleotide small temporal RNAs (stRNAs) from precursor RNA of conserved structure that are implicated in translational control (Hutvagner et al., 2001, Science, 293, 834). The RNAi response also features an endonuclease complex containing a siRNA, commonly referred to as an RNA-induced silencing complex (RISC), which mediates cleavage of single-stranded RNA having sequence homologous to the siRNA. Cleavage of the target RNA takes place in the middle of the region complementary to the guide sequence of the siRNA duplex (Elbashir et al., 2001, Genes Dev., 15, 188). In addition, RNA interference can also involve small RNA (e.g., micro-RNA or miRNA) mediated gene silencing, presumably though cellular mechanisms that regulate chromatin structure and thereby prevent transcription of target gene sequences (see for example Allshire, 2002, Science, 297, 1818-1819; Volpe et al., 2002, Science, 297, 1833-1837; Jenuwein, 2002, Science, 297, 2215-2218; and Hall et al., 2002, Science, 297, 2232-2237). As such, siNA molecules of the invention can be used to mediate gene silencing via interaction with RNA transcripts or alternately by interaction with particular gene sequences, wherein such interaction results in gene silencing either at the transcriptional level or post-transcriptional level.

[0418] RNAi has been studied in a variety of systems. Fire et al., 1998, Nature, 391, 806, were the first to observe RNAi in C. elegans. Wianny and Goetz, 1999, Nature Cell Biol., 2, 70, describe RNAi mediated by dsRNA in mouse embryos. Hammond et al., 2000, Nature, 404, 293, describe RNAi in Drosophila cells transfected with dsRNA. Elbashir et al., 2001, Nature, 411, 494, describe RNAi induced by introduction of duplexes of synthetic 21-nucleotide RNAs in cultured mammalian cells including human embryonic kidney and HeLa cells. Recent work in Drosophila embryonic lysates has revealed certain requirements for siRNA length, structure, chemical composition, and sequence that are essential to mediate efficient RNAi activity. These studies have shown that 21 nucleotide siRNA duplexes are most active when containing two 2-nucleotide 3′-terminal nucleotide overhangs. Furthermore, substitution of one or both siRNA strands with 2′-deoxy or 2′-O-methyl nucleotides abolishes RNAi activity, whereas substitution of 3′-terminal siRNA nucleotides with deoxy nucleotides was shown to be tolerated. Mismatch sequences in the center of the siRNA duplex were also shown to abolish RNAi activity. In addition, these studies also indicate that the position of the cleavage site in the target RNA is defined by the 5′-end of the siRNA guide sequence rather than the 3′-end (Elbashir et al., 2001, EMBO J., 20, 6877). Other studies have indicated that a 5′-phosphate on the target-complementary strand of a siRNA duplex is required for siRNA activity and that ATP is utilized to maintain the 5′-phosphate moiety on the siRNA (Nykanen et al., 2001, Cell, 107, 309); however, siRNA molecules lacking a 5′-phosphate are active when introduced exogenously, suggesting that 5′-phosphorylation of siRNA constructs may occur in vivo.

Duplex Forming Oligonucleotides (DFO) of the Invention

[0419] In one embodiment, the invention features siNA molecules comprising duplex forming oligonucleotides (DFO) that can self-assemble into double stranded oligonucleotides. The duplex forming oligonucleotides of the invention can be chemically synthesized or expressed from transcription units and/or vectors. The DFO molecules of the instant invention provide useful reagents and methods for a variety of therapeutic, diagnostic, agricultural, veterinary, target validation, genomic discovery, genetic engineering and pharmacogenomic applications.

[0420] Applicant demonstrates herein that certain oligonucleotides, referred to herein for convenience but not limitation as duplex forming oligonucleotides or DFO molecules, are potent mediators of sequence specific regulation of gene expression. The oligonucleotides of the invention are distinct from other nucleic acid sequences known in the art (e.g., siRNA, miRNA, stRNA, shRNA, antisense oligonucleotides etc.) in that they represent a class of linear polynucleotide sequences that are designed to self-assemble into double stranded oligonucleotides, where each strand in the double stranded oligonucleotides comprises a nucleotide sequence that is complementary to a target nucleic acid molecule. Nucleic acid molecules of the invention can thus self assemble into functional duplexes in which each strand of the duplex comprises the same polynucleotide sequence and each strand comprises a nucleotide sequence that is complementary to a target nucleic acid molecule.

[0421] Generally, double stranded oligonucleotides are formed by the assembly of two distinct oligonucleotide sequences where the oligonucleotide sequence of one strand is complementary to the oligonucleotide sequence of the second strand; such double stranded oligonucleotides are assembled from two separate oligonucleotides, or from a single molecule that folds on itself to form a double stranded structure, often referred to in the field as hairpin stem-loop structure (e.g., shRNA or short hairpin RNA). These double stranded oligonucleotides known in the art all have a common feature in that each strand of the duplex has a distinct nucleotide sequence.

[0422] Distinct from the double stranded nucleic acid molecules known in the art, the applicants have developed a novel, potentially cost effective and simplified method of forming a double stranded nucleic acid molecule starting from a single stranded or linear oligonucleotide. The two strands of the double stranded oligonucleotide formed according to the instant invention have the same nucleotide sequence and are not covalently linked to each other. Such double-stranded oligonucleotides molecules can be readily linked post-synthetically by methods and reagents known in the art and are within the scope of the invention. In one embodiment, the single stranded oligonucleotide of the invention (the duplex forming oligonucleotide) that forms a double stranded oligonucleotide comprises a first region and a second region, where the second region includes a nucleotide sequence that is an inverted repeat of the nucleotide sequence in the first region, or a portion thereof, such that the single stranded oligonucleotide self assembles to form a duplex oligonucleotide in which the nucleotide sequence of one strand of the duplex is the same as the nucleotide sequence of the second strand. Non-limiting examples of such duplex forming oligonucleotides are illustrated in FIGS. 94 and 95. These duplex forming oligonucleotides (DFOs) can optionally include certain palindrome or repeat sequences where such palindrome or repeat sequences are present in between the first region and the second region of the DFO.

[0423] In one embodiment, the invention features a duplex forming oligonucleotide (DFO) molecule, wherein the DFO comprises a duplex forming self complementary nucleic acid sequence that has nucleotide sequence complementary to a target nucleic acid sequence. The DFO molecule can comprise a single self complementary sequence or a duplex resulting from assembly of such self complementary sequences.

[0424] In one embodiment, a duplex forming oligonucleotide (DFO) of the invention comprises a first region and a second region, wherein the second region comprises a nucleotide sequence comprising an inverted repeat of nucleotide sequence of the first region such that the DFO molecule can assemble into a double stranded oligonucleotide. Such double stranded oligonucleotides can act as a short interfering nucleic acid (siNA) to modulate gene expression. Each strand of the double stranded oligonucleotide duplex formed by DFO molecules of the invention can comprise a nucleotide sequence region that is complementary to the same nucleotide sequence in a target nucleic acid molecule (e.g., target RNA).

[0425] In one embodiment, the invention features a single stranded DFO that can assemble into a double stranded oligonucleotide. The applicant has surprisingly found that a single stranded oligonucleotide with nucleotide regions of self complementarity can readily assemble into duplex oligonucleotide constructs. Such DFOs can assemble into duplexes that can inhibit gene expression in a sequence specific manner. The DFO molecules of the invention comprise a first region with nucleotide sequence that is complementary to the nucleotide sequence of a second region and where the sequence of the first region is complementary to a target nucleic acid (e.g., RNA). The DFO can form a double stranded oligonucleotide wherein a portion of each strand of the double stranded oligonucleotide comprises a sequence complementary to a target nucleic acid sequence.

[0426] In one embodiment, the invention features a double stranded oligonucleotide, wherein the two strands of the double stranded oligonucleotide are not covalently linked to each other, and wherein each strand of the double stranded oligonucleotide comprises a nucleotide sequence that is complementary to the same nucleotide sequence in a target nucleic acid molecule or a portion thereof. In another embodiment, the two strands of the double stranded oligonucleotide share an identical nucleotide sequence of at least about 15, preferably at least about 16, 17, 18, 19, 20, or 21 nucleotides.

[0427] In one embodiment, a DFO molecule of the invention comprises a structure having Formula DFO-I:

5′-p-X Z X′-3′

wherein Z comprises a palindromic or repeat nucleic acid sequence optionally with one or more modified nucleotides (e.g., nucleotide with a modified base, such as 2-amino purine, 2-amino-1,6-dihydro purine or a universal base), for example of length about 2 to about 24 nucleotides in even numbers (e.g., about 2, 4, 6, 8, 10, 12, 14, 16, 18, 20, or 22 or 24 nucleotides), X represents a nucleic acid sequence, for example of length between about 1 to about 21 nucleotides (e.g., about 1, 2, 3, 4, 5, 6, 7, 8, 9, 10, 11, 12, 13, 14, 15, 16, 17, 18, 19, 20, or 21 nucleotides), X′ comprises a nucleic acid sequence, for example of length about 1 and about 21 nucleotides (e.g., about 1, 2, 3, 4, 5, 6, 7, 8, 9, 10, 11, 12, 13, 14, 15, 16, 17, 18, 19, 20 or 21 nucleotides) having nucleotide sequence complementarity to sequence X or a portion thereof, p comprises a terminal phosphate group that can be present or absent, and wherein sequence X and Z, either independently or together, comprise nucleotide sequence that is complementary to a target nucleic acid sequence or a portion thereof and is of length sufficient to interact (e.g., base pair) with the target nucleic acid sequence or a portion thereof. For example, X independently can comprise a sequence from about 12 to about 21 or more (e.g., about 12, 13, 14, 15, 16, 17, 18, 19, 20, 21, or more) nucleotides in length that is complementary to nucleotide sequence in a target RNA or a portion thereof. In another non-limiting example, the length of the nucleotide sequence of X and Z together, when X is present, that is complementary to the target RNA or a portion thereof is from about 12 to about 21 or more nucleotides (e.g., about 12, 13, 14, 15, 16, 17, 18, 19, 20, 21, or more). In yet another non-limiting example, when X is absent, the length of the nucleotide sequence of Z that is complementary to the target RNA or a portion thereof is from about 12 to about 24 or more nucleotides (e.g., about 12, 14, 16, 18, 20, 22, 24, or more). In one embodiment X, Z and X′ are independently oligonucleotides, where X and/or Z comprises a nucleotide sequence of length sufficient to interact (e.g., base pair) with a nucleotide sequence in the target RNA or a portion thereof. In one embodiment, the lengths of oligonucleotides X and X′ are identical. In another embodiment, the lengths of oligonucleotides X and X′ are not identical. In another embodiment, the lengths of oligonucleotides X and Z, or Z and X′, or X, Z and X′ are either identical or different.

[0428] When a sequence is described in this specification as being of “sufficient” length to interact (i.e., base pair) with another sequence, it is meant that the length is such that the number of bonds (e.g., hydrogen bonds) formed between the two sequences is enough to enable the two sequence to form a duplex under the conditions of interest. Such conditions can be in vitro (e.g., for diagnostic or assay purposes) or in vivo (e.g. for therapeutic purposes). It is a simple and routine matter to determine such lengths.

[0429] In one embodiment, the invention features a double stranded oligonucleotide construct having Formula DFO-I(a):

5′-p-X Z X′-3′
3′-X′ Z X-p-5′

wherein Z comprises a palindromic or repeat nucleic acid sequence or palindromic or repeat-like nucleic acid sequence with one or more modified nucleotides (e.g., nucleotides with a modified base, such as 2-amino purine, 2-amino-1,6-dihydro purine or a universal base), for example of length about 2 to about 24 nucleotides in even numbers (e.g., about 2, 4, 6, 8, 10, 12, 14, 16, 18, 20, 22 or 24 nucleotides), X represents a nucleic acid sequence, for example of length about 1 to about 21 nucleotides (e.g., about 1, 2, 3, 4, 5, 6, 7, 8, 9, 10, 11, 12, 13, 14, 15, 16, 17, 18, 19, 20, or 21 nucleotides), X′ comprises a nucleic acid sequence, for example of length about 1 to about 21 nucleotides (e.g., about 1, 2, 3, 4, 5, 6, 7, 8, 9, 10, 11, 12, 13, 14, 15, 16, 17, 18, 19, 20 or 21 nucleotides) having nucleotide sequence complementarity to sequence X or a portion thereof, p comprises a terminal phosphate group that can be present or absent, and wherein each X and Z independently comprises a nucleotide sequence that is complementary to a target nucleic acid sequence or a portion thereof and is of length sufficient to interact with the target nucleic acid sequence of a portion thereof. For example, sequence X independently can comprise a sequence from about 12 to about 21 or more nucleotides (e.g., about 12, 13, 14, 15, 16, 17, 18, 19, 20, 21, or more) in length that is complementary to a nucleotide sequence in a target RNA or a portion thereof. In another non-limiting example, the length of the nucleotide sequence of X and Z together (when X is present) that is complementary to the target RNA or a portion thereof is from about 12 to about 21 or more nucleotides (e.g., about 12, 13, 14, 15, 16, 17, 18, 19, 20, 21, or more). In yet another non-limiting example, when X is absent, the length of the nucleotide sequence of Z that is complementary to the target RNA or a portion thereof is from about 12 to about 24 or more nucleotides (e.g., about 12, 14, 16, 18, 20, 22, 24 or more). In one embodiment X, Z and X′ are independently oligonucleotides, where X and/or Z comprises a nucleotide sequence of length sufficient to interact (e.g., base pair) with nucleotide sequence in the target RNA or a portion thereof. In one embodiment, the lengths of oligonucleotides X and X′ are identical. In another embodiment, the lengths of oligonucleotides X and X′ are not identical. In another embodiment, the lengths of oligonucleotides X and Z or Z and X′ or X, Z and X′ are either identical or different. In one embodiment, the double stranded oligonucleotide construct of Formula I(a) includes one or more, specifically 1, 2, 3 or 4, mismatches, to the extent such mismatches do not significantly diminish the ability of the double stranded oligonucleotide to inhibit target gene expression.

[0430] In one embodiment, a DFO molecule of the invention comprises structure having Formula DFO-II:

5′-p-X X′-3′

wherein each X and X′ are independently oligonucleotides of length about 12 nucleotides to about 21 nucleotides, wherein X comprises, for example, a nucleic acid sequence of length about 12 to about 21 nucleotides (e.g., about 12, 13, 14, 15, 16, 17, 18, 19, 20 or 21 nucleotides), X′ comprises a nucleic acid sequence, for example of length about 12 to about 21 nucleotides (e.g., about 12, 13, 14, 15, 16, 17, 18, 19, 20, or 21 nucleotides) having nucleotide sequence complementarity to sequence X or a portion thereof, p comprises a terminal phosphate group that can be present or absent, and wherein X comprises a nucleotide sequence that is complementary to a target nucleic acid sequence (e.g., RNA) or a portion thereof and is of length sufficient to interact (e.g., base pair) with the target nucleic acid sequence of a portion thereof. In one embodiment, the length of oligonucleotides X and X′ are identical. In another embodiment the length of oligonucleotides X and X′ are not identical. In one embodiment, length of the oligonucleotides X and X′ are sufficient to form a relatively stable double stranded oligonucleotide.

[0431] In one embodiment, the invention features a double stranded oligonucleotide construct having Formula DFO-II(a):

5′-p-X X′-3′
3′-X′ X-p-5′

wherein each X and X′ are independently oligonucleotides of length about 12 nucleotides to about 21 nucleotides, wherein X comprises a nucleic acid sequence, for example of length about 12 to about 21 nucleotides (e.g., about 12, 13, 14, 15, 16, 17, 18, 19, 20 or 21 nucleotides), X′ comprises a nucleic acid sequence, for example of length about 12 to about 21 nucleotides (e.g., about 12, 13, 14, 15, 16, 17, 18, 19, 20 or 21 nucleotides) having nucleotide sequence complementarity to sequence X or a portion thereof, p comprises a terminal phosphate group that can be present or absent, and wherein X comprises nucleotide sequence that is complementary to a target nucleic acid sequence or a portion thereof and is of length sufficient to interact (e.g., base pair) with the target nucleic acid sequence (e.g., RNA) of a portion thereof. In one embodiment, the lengths of oligonucleotides X and X′ are identical. In another embodiment, the lengths of oligonucleotides X and X′ are not identical. In one embodiment, the lengths of the oligonucleotides X and X′ are sufficient to form a relatively stable double stranded oligonucleotide. In one embodiment, the double stranded oligonucleotide construct of Formula II(a) includes one or more, specifically 1, 2, 3 or 4, mismatches, to the extent such mismatches do not significantly diminish the ability of the double stranded oligonucleotide to inhibit target gene expression.

[0432] In one embodiment, the invention features a DFO molecule having Formula DFO-I(b):

5′-p-Z-3′

where Z comprises a palindromic or repeat nucleic acid sequence optionally including one or more non-standard or modified nucleotides (e.g., nucleotide with a modified base, such as 2-amino purine or a universal base) that can facilitate base-pairing with other nucleotides. Z can be, for example, of length sufficient to interact (e.g., base pair) with nucleotide sequence of a target nucleic acid (e.g., RNA) molecule, preferably of length of at least 12 nucleotides, specifically about 12 to about 24 nucleotides (e.g., about 12, 14, 16, 18, 20, 22 or 24 nucleotides). p represents a terminal phosphate group that can be present or absent.

[0433] In one embodiment, a DFO molecule having any of Formula DFO-I, DFO-I(a), DFO-I(b), DFO-II(a) or DFO-II can comprise chemical modifications as described herein without limitation, such as, for example, nucleotides having any of Formulae I-VII, stabilization chemistries as described in Table IV, or any other combination of modified nucleotides and non-nucleotides as described in the various embodiments herein.

[0434] In one embodiment, the palindrome or repeat sequence or modified nucleotide (e.g., nucleotide with a modified base, such as 2-amino purine or a universal base) in Z of DFO constructs having Formula DFO-I, DFO-I(a) and DFO-I(b), comprises chemically modified nucleotides that are able to interact with a portion of the target nucleic acid sequence (e.g., modified base analogs that can form Watson Crick base pairs or non-Watson Crick base pairs).

[0435] In one embodiment, a DFO molecule of the invention, for example a DFO having Formula DFO-I or DFO-II, comprises about 15 to about 40 nucleotides (e.g., about 15, 16, 17, 18, 19, 20, 21, 22, 23, 24, 25, 26, 27, 28, 29, 30, 31, 32, 33, 34, 35, 36, 37, 38, 39, or 40 nucleotides). In one embodiment, a DFO molecule of the invention comprises one or more chemical modifications. In a non-limiting example, the introduction of chemically modified nucleotides and/or non-nucleotides into nucleic acid molecules of the invention provides a powerful tool in overcoming potential limitations of in vivo stability and bioavailability inherent to unmodified RNA molecules that are delivered exogenously. For example, the use of chemically modified nucleic acid molecules can enable a lower dose of a particular nucleic acid molecule for a given therapeutic effect since chemically modified nucleic acid molecules tend to have a longer half-life in serum or in cells or tissues. Furthermore, certain chemical modifications can improve the bioavailability and/or potency of nucleic acid molecules by not only enhancing half-life but also facilitating the targeting of nucleic acid molecules to particular organs, cells or tissues and/or improving cellular uptake of the nucleic acid molecules. Therefore, even if the activity of a chemically modified nucleic acid molecule is reduced in vitro as compared to a native/unmodified nucleic acid molecule, for example when compared to an unmodified RNA molecule, the overall activity of the modified nucleic acid molecule can be greater than the native or unmodified nucleic acid molecule due to improved stability, potency, duration of effect, bioavailability and/or delivery of the molecule.

Multifunctional or Multi-Targeted siNA Molecules of the Invention

[0436] In one embodiment, the invention features siNA molecules comprising multifunctional short interfering nucleic acid (multifunctional siNA) molecules that modulate the expression of one or more genes in a biologic system, such as a cell, tissue, or organism. The multifunctional short interfering nucleic acid (multifunctional siNA) molecules of the invention can target more than one region of the target nucleic acid sequence or can target sequences of more than one distinct target nucleic acid molecules. The multifunctional siNA molecules of the invention can be chemically synthesized or expressed from transcription units and/or vectors. The multifunctional siNA molecules of the instant invention provide useful reagents and methods for a variety of human applications, therapeutic, diagnostic, agricultural, veterinary, target validation, genomic discovery, genetic engineering and pharmacogenomic applications.

[0437] Applicant demonstrates herein that certain oligonucleotides, referred to herein for convenience but not limitation as multifunctional short interfering nucleic acid or multifunctional siNA molecules, are potent mediators of sequence specific regulation of gene expression. The multifunctional siNA molecules of the invention are distinct from other nucleic acid sequences known in the art (e.g., siRNA, miRNA, stRNA, shRNA, antisense oligonucleotides, etc.) in that they represent a class of polynucleotide molecules that are designed such that each strand in the multifunctional siNA construct comprises a nucleotide sequence that is complementary to a distinct nucleic acid sequence in one or more target nucleic acid molecules. A single multifunctional siNA molecule (generally a double-stranded molecule) of the invention can thus target more than one (e.g., 2, 3, 4, 5, or more) differing target nucleic acid target molecules. Nucleic acid molecules of the invention can also target more than one (e.g., 2, 3, 4, 5, or more) region of the same target nucleic acid sequence. As such multifunctional siNA molecules of the invention are useful in down regulating or inhibiting the expression of one or more target nucleic acid molecules. For example, a multifunctional siNA molecule of the invention can target nucleic acid molecules encoding a cytokine and its corresponding receptor(s), nucleic acid molecules encoding a virus or viral proteins and corresponding cellular proteins required for viral infection and/or replication, or differing strains of a particular virus. By reducing or inhibiting expression of more than one target nucleic acid molecule with one multifunctional siNA construct, multifunctional siNA molecules of the invention represent a class of potent therapeutic agents that can provide simultaneous inhibition of multiple targets within a disease related pathway. Such simultaneous inhibition can provide synergistic therapeutic treatment strategies without the need for separate preclinical and clinical development efforts or complex regulatory approval process.

[0438] Use of multifunctional siNA molecules that target more then one region of a target nucleic acid molecule (e.g., messenger RNA) is expected to provide potent inhibition of gene expression. For example, a single multifunctional siNA construct of the invention can target both conserved and variable regions of a target nucleic acid molecule, thereby allowing down regulation or inhibition of different splice variants encoded by a single gene, or allowing for targeting of both coding and non-coding regions of a target nucleic acid molecule.

[0439] Generally, double stranded oligonucleotides are formed by the assembly of two distinct oligonucleotides where the oligonucleotide sequence of one strand is complementary to the oligonucleotide sequence of the second strand; such double stranded oligonucleotides are generally assembled from two separate oligonucleotides (e.g., siRNA). Alternately, a duplex can be formed from a single molecule that folds on itself (e.g., shRNA or short hairpin RNA). These double stranded oligonucleotides are known in the art to mediate RNA interference and all have a common feature wherein only one nucleotide sequence region (guide sequence or the antisense sequence) has complementarity to a target nucleic acid sequence and the other strand (sense sequence) comprises nucleotide sequence that is homologous to the target nucleic acid sequence. Generally, the antisense sequence is retained in the active RISC complex and guides the RISC to the target nucleotide sequence by means of complementary base-pairing of the antisense sequence with the target sequence for mediating sequence-specific RNA interference. It is known in the art that in some cell culture systems, certain types of unmodified siRNAs can exhibit “off target” effects. It is hypothesized that this off-target effect involves the participation of the sense sequence instead of the antisense sequence of the siRNA in the RISC complex (see for example Schwarz et al., 2003, Cell, 115, 199-208). In this instance the sense sequence is believed to direct the RISC complex to a sequence (off-target sequence) that is distinct from the intended target sequence, resulting in the inhibition of the off-target sequence. In these double stranded nucleic acid molecules, each strand is complementary to a distinct target nucleic acid sequence. However, the off-targets that are affected by these dsRNAs are not entirely predictable and are non-specific.

[0440] Distinct from the double stranded nucleic acid molecules known in the art, the applicants have developed a novel, potentially cost effective and simplified method of down regulating or inhibiting the expression of more than one target nucleic acid sequence using a single multifunctional siNA construct. The multifunctional siNA molecules of the invention are designed to be double-stranded or partially double stranded, such that a portion of each strand or region of the multifunctional siNA is complementary to a target nucleic acid sequence of choice. As such, the multifunctional siNA molecules of the invention are not limited to targeting sequences that are complementary to each other, but rather to any two differing target nucleic acid sequences. Multifunctional siNA molecules of the invention are designed such that each strand or region of the multifunctional siNA molecule, that is complementary to a given target nucleic acid sequence, is of suitable length (e.g., from about 16 to about 28 nucleotides in length, preferably from about 18 to about 28 nucleotides in length) for mediating RNA interference against the target nucleic acid sequence. The complementarity between the target nucleic acid sequence and a strand or region of the multifunctional siNA must be sufficient (at least about 8 base pairs) for cleavage of the target nucleic acid sequence by RNA interference multifunctional siNA of the invention is expected to minimize off-target effects seen with certain siRNA sequences, such as those described in (Schwarz et al., supra).

[0441] It has been reported that dsRNAs of length between 29 base pairs and 36 base pairs (Tuschl et al., International PCT Publication No. WO 02/44321) do not mediate RNAi. One reason these dsRNAs are inactive may be the lack of turnover or dissociation of the strand that interacts with the target RNA sequence, such that the RISC complex is not able to efficiently interact with multiple copies of the target RNA resulting in a significant decrease in the potency and efficiency of the RNAi process. Applicant has surprisingly found that the multifunctional siNAs of the invention can overcome this hurdle and are capable of enhancing the efficiency and potency of RNAi process. As such, in certain embodiments of the invention, multifunctional siNAs of length between about 29 to about 36 base pairs can be designed such that, a portion of each strand of the multifunctional siNA molecule comprises a nucleotide sequence region that is complementary to a target nucleic acid of length sufficient to mediate RNAi efficiently (e.g., about 15 to about 23 base pairs) and a nucleotide sequence region that is not complementary to the target nucleic acid. By having both complementary and non-complementary portions in each strand of the multifunctional siNA, the multifunctional siNA can mediate RNA interference against a target nucleic acid sequence without being prohibitive to turnover or dissociation (e.g., where the length of each strand is too long to mediate RNAi against the respective target nucleic acid sequence). Furthermore, design of multifunctional siNA molecules of the invention with internal overlapping regions allows the multifunctional siNA molecules to be of favorable (decreased) size for mediating RNA interference and of size that is well suited for use as a therapeutic agent (e.g., wherein each strand is independently from about 18 to about 28 nucleotides in length). Non-limiting examples are illustrated in the enclosed FIGS. 96-101 and 112.

[0442] In one embodiment, a multifunctional siNA molecule of the invention comprises a first region and a second region, where the first region of the multifunctional siNA comprises A nucleotide sequence complementary to a nucleic acid sequence of a first target nucleic acid molecule, and the second region of the multifunctional siNA comprises nucleic acid sequence complementary to a nucleic acid sequence of a second target nucleic acid molecule. In one embodiment, a multifunctional siNA molecule of the invention comprises a first region and a second region, where the first region of the multifunctional siNA comprises nucleotide sequence complementary to a nucleic acid sequence of the first region of a target nucleic acid molecule, and the second region of the multifunctional siNA comprises nucleotide sequence complementary to a nucleic acid sequence of a second region of a the target nucleic acid molecule. In another embodiment, the first region and second region of the multifunctional siNA can comprise separate nucleic acid sequences that share some degree of complementarity (e.g., from about 1 to about 10 complementary nucleotides). In certain embodiments, multifunctional siNA constructs comprising separate nucleic acid sequences can be readily linked post-synthetically by methods and reagents known in the art and such linked constructs are within the scope of the invention. Alternately, the first region and second region of the multifunctional siNA can comprise a single nucleic acid sequence having some degree of self complementarity, such as in a hairpin or stem-loop structure. Non-limiting examples of such double stranded and hairpin multifunctional short interfering nucleic acids are illustrated in FIGS. 96 and 97 respectively. These multifunctional short interfering nucleic acids (multifunctional siNAs) can optionally include certain overlapping nucleotide sequence where such overlapping nucleotide sequence is present in between the first region and the second region of the multifunctional siNA (see for example FIGS. 98 and 99).

[0443] In one embodiment, the invention features a multifunctional short interfering nucleic acid (multifunctional siNA) molecule, wherein each strand of the multifunctional siNA independently comprises a first region of nucleic acid sequence that is complementary to a distinct target nucleic acid sequence and the second region of nucleotide sequence that is not complementary to the target sequence. The target nucleic acid sequence of each strand is in the same target nucleic acid molecule or different target nucleic acid molecules.

[0444] In another embodiment, the multifunctional siNA comprises two strands, where: (a) the first strand comprises a region having sequence complementarity to a target nucleic acid sequence (complementary region 1) and a region having no sequence complementarity to the target nucleotide sequence (non-complementary region 1); (b) the second strand of the multifunction siNA comprises a region having sequence complementarity to a target nucleic acid sequence that is distinct from the target nucleotide sequence complementary to the first strand nucleotide sequence (complementary region 2), and a region having no sequence complementarity to the target nucleotide sequence of complementary region 2 (non-complementary region 2); (c) the complementary region 1 of the first strand comprises a nucleotide sequence that is complementary to a nucleotide sequence in the non-complementary region 2 of the second strand and the complementary region 2 of the second strand comprises a nucleotide sequence that is complementary to a nucleotide sequence in the non-complementary region 1 of the first strand. The target nucleic acid sequence of complementary region 1 and complementary region 2 is in the same target nucleic acid molecule or different target nucleic acid molecules.

[0445] In another embodiment, the multifunctional siNA comprises two strands, where: (a) the first strand comprises a region having sequence complementarity to a target nucleic acid sequence derived from a gene (e.g., mammalian gene, viral gene or genome, bacterial gene or a plant gene) (complementary region 1) and a region having no sequence complementarity to the target nucleotide sequence of complementary region 1 (non-complementary region 1); (b) the second strand of the multifunction siNA comprises a region having sequence complementarity to a target nucleic acid sequence derived from a gene that is distinct from the gene of complementary region 1 (complementary region 2), and a region having no sequence complementarity to the target nucleotide sequence of complementary region 2 (non-complementary region 2); (c) the complementary region 1 of the first strand comprises a nucleotide sequence that is complementary to a nucleotide sequence in the non-complementary region 2 of the second strand and the complementary region 2 of the second strand comprises a nucleotide sequence that is complementary to a nucleotide sequence in the non-complementary region 1 of the first strand.

[0446] In another embodiment, the multifunctional siNA comprises two strands, where: (a) the first strand comprises a region having sequence complementarity to a target nucleic acid sequence derived from a gene (e.g., mammalian gene, viral gene or genome, bacterial gene or a plant gene) (complementary region 1) and a region having no sequence complementarity to the target nucleotide sequence of complementary region 1 (non-complementary region 1); (b) the second strand of the multifunction siNA comprises a region having sequence complementarity to a target nucleic acid sequence distinct from the target nucleic acid sequence of complementary region 1 (complementary region 2), provided, however, that the target nucleic acid sequence for complementary region 1 and target nucleic acid sequence for complementary region 2 are both derived from the same gene, and a region having no sequence complementarity to the target nucleotide sequence of complementary region 2 (non-complementary region 2); (c) the complementary region 1 of the first strand comprises a nucleotide sequence that is complementary to a nucleotide sequence in the non-complementary region 2 of the second strand and the complementary region 2 of the second strand comprises a nucleotide sequence that is complementary to nucleotide sequence in the non-complementary region 1 of the first strand.

[0447] In one embodiment, the invention features a multifunctional short interfering nucleic acid (multifunctional siNA) molecule, wherein the multifunctional siNA comprises two complementary nucleic acid sequences in which the first sequence comprises a first region having nucleotide sequence complementary to nucleotide sequence within a target nucleic acid molecule, and in which the second sequence comprises a first region having nucleotide sequence complementary to a distinct nucleotide sequence within the same target nucleic acid molecule. Preferably, the first region of the first sequence is also complementary to the nucleotide sequence of the second region of the second sequence, and where the first region of the second sequence is complementary to the nucleotide sequence of the second region of the first sequence, In one embodiment, the invention features a multifunctional short interfering nucleic acid (multifunctional siNA) molecule, wherein the multifunctional siNA comprises two complementary nucleic acid sequences in which the first sequence comprises a first region having a nucleotide sequence complementary to a nucleotide sequence within a first target nucleic acid molecule, and in which the second sequence comprises a first region having a nucleotide sequence complementary to a distinct nucleotide sequence within a second target nucleic acid molecule. Preferably, the first region of the first sequence is also complementary to the nucleotide sequence of the second region of the second sequence, and where the first region of the second sequence is complementary to the nucleotide sequence of the second region of the first sequence,

[0448] In one embodiment, the invention features a multifunctional siNA molecule comprising a first region and a second region, where the first region comprises a nucleic acid sequence having between about 18 to about 28 nucleotides complementary to a nucleic acid sequence within a first target nucleic acid molecule, and the second region comprises nucleotide sequence having between about 18 to about 28 nucleotides complementary to a distinct nucleic acid sequence within a second target nucleic acid molecule.

[0449] In one embodiment, the invention features a multifunctional siNA molecule comprising a first region and a second region, where the first region comprises nucleic acid sequence having between about 18 to about 28 nucleotides complementary to a nucleic acid sequence within a target nucleic acid molecule, and the second region comprises nucleotide sequence having between about 18 to about 28 nucleotides complementary to a distinct nucleic acid sequence within the same target nucleic acid molecule.

[0450] In one embodiment, the invention features a double stranded multifunctional short interfering nucleic acid (multifunctional siNA) molecule, wherein one strand of the multifunctional siNA comprises a first region having nucleotide sequence complementary to a first target nucleic acid sequence, and the second strand comprises a first region having a nucleotide sequence complementary to a second target nucleic acid sequence. The first and second target nucleic acid sequences can be present in separate target nucleic acid molecules or can be different regions within the same target nucleic acid molecule. As such, multifunctional siNA molecules of the invention can be used to target the expression of different genes, splice variants of the same gene, both mutant and conserved regions of one or more gene transcripts, or both coding and non-coding sequences of the same or differing genes or gene transcripts.

[0451] In one embodiment, a target nucleic acid molecule of the invention encodes a single protein. In another embodiment, a target nucleic acid molecule encodes more than one protein (e.g., 1, 2, 3, 4, 5 or more proteins). As such, a multifunctional siNA construct of the invention can be used to down regulate or inhibit the expression of several proteins. For example, a multifunctional siNA molecule comprising a region in one strand having nucleotide sequence complementarity to a first target nucleic acid sequence derived from a gene encoding one protein (e.g., a cytokine, such as vascular endothelial growth factor or VEGF) and the second strand comprising a region with nucleotide sequence complementarily to a second target nucleic acid sequence present in target nucleic acid molecules derived from genes encoding two proteins (e.g., two differing receptors, such as VEGF receptor 1 and VEGF receptor 2, for a single cytokine, such as VEGF) can be used to down regulate, inhibit, or shut down a particular biologic pathway by targeting, for example, a cytokine and receptors for the cytokine, or a ligand and receptors for the ligand.

[0452] In one embodiment the invention takes advantage of conserved nucleotide sequences present in different isoforms of cytokines or ligands and receptors for the cytokines or ligands. By designing multifunctional siNAs in a manner where one strand includes a sequence that is complementary to a target nucleic acid sequence conserved among various isoforms of a cytokine and the other strand includes sequence that is complementary to a target nucleic acid sequence conserved among the receptors for the cytokine, it is possible to selectively and effectively modulate or inhibit a biological pathway or multiple genes in a biological pathway using a single multifunctional siNA.

[0453] In another nonlimiting example, a multifunctional siNA molecule comprising a region in one strand having a nucleotide sequence complementarity to a first target nucleic acid sequence present in target nucleic acid molecules encoding two proteins (e.g., two isoforms of a cytokine such as VEGF, including for example any of VEGF-A, VEGF-B, VEGF-C, and/or VEGF-D) and the second strand comprising a region with a nucleotide sequence complementarity to a second target nucleic acid sequence present in target nucleotide molecules encoding two additional proteins (e.g., two differing receptors for the cytokine, such as VEGFR1, VEGFR2, and/or VEGFR3) can be used to down regulate, inhibit, or shut down a particular biologic pathway by targeting different isoforms of a cytokine and receptors for such cytokines.

[0454] In another non-limiting example, a multifunctional siNA molecule comprising a region in one strand having a nucleotide sequence complementarity to a first target nucleic acid sequence derived from a target nucleic acid molecule encoding a virus or a viral protein (e.g., HIV) and the second strand comprising a region having a nucleotide sequence complementarity to a second target nucleic acid sequence present in target nucleic acid molecule encoding a cellular protein (e.g., a receptor for the virus, such as CCR5 receptor for HIV) can be used to down regulate, inhibit, or shut down the viral replication and infection by targeting the virus and cellular proteins necessary for viral infection or replication.

[0455] In another nonlimiting example, a multifunctional siNA molecule comprising a region in one strand having a nucleotide sequence complementarity to a first target nucleic acid sequence (e.g., conserved sequence) present in a target nucleic acid molecule such as a viral genome (e.g., HIV genomic RNA) and the second strand comprising a region having a nucleotide sequence complementarity to a second target nucleic acid sequence (e.g., conserved sequence) present in target nucleic acid molecule derived from a gene encoding a viral protein (e.g., HIV proteins, such as TAT, REV, ENV or NEF) to down regulate, inhibit, or shut down the viral replication and infection by targeting the viral genome and viral encoded proteins necessary for viral infection or replication.

[0456] In one embodiment the invention takes advantage of conserved nucleotide sequences present in different strains, isotypes or forms of a virus and genes encoded by these different strains, isotypes and forms of the virus. By designing multifunctional siNAs in a manner where one strand includes a sequence that is complementary to target nucleic acid sequence conserved among various strains, isotypes or forms of a virus and the other strand includes sequence that is complementary to target nucleic acid sequence conserved in a protein encoded by the virus, it is possible to selectively and effectively inhibit viral replication or infection using a single multifunctional siNA.

[0457] In one embodiment, a multifunctional short interfering nucleic acid (multifunctional siNA) of the invention comprises a region in each strand, wherein the region in one strand comprises nucleotide sequence complementary to a cytokine and the region in the second strand comprises nucleotide sequence complementary to a corresponding receptor for the cytokine. Non-limiting examples of cytokines include vascular endothelial growth factors (e.g., VEGF-A, VEGF-B, VEGF-C, VEGF-D), interleukins (e.g., IL-1alpha, IL-1beta, IL-2, IL-3, IL-4, IL-5, IL-6, IL-7, IL-8, IL-9, IL-10, IL-11, IL-12, IL-13), tumor necrosis factors (e.g., TNF-alpha, TNF-beta), colony stimulating factors (e.g., CSFs), interferons (e.g., IFN-gamma), nerve growth factors (e.g., NGFs), epidermal growth factors (e.g., EGF), platelet derived growth factors (e.g., PDGF), fibroblast growth factors (e.g., FGF), transforming growth factors (e.g., TGF-alpha and TGF-beta), erythropoietins (e.g., Epo), and Insulin like growth factors (e.g., IGF-1, IGF-2) and non-limiting examples of cytokine receptors include receptors for each of the above cytokines.

[0458] In one embodiment, a multifunctional short interfering nucleic acid (multifunctional siNA) of the invention comprises a first region and a second region, wherein the first region comprises nucleotide sequence complementary to a viral RNA of a first viral strain and the second region comprises nucleotide sequence complementary to a viral RNA of a second viral strain. In one embodiment, the first and second regions can comprise nucleotide sequence complementary to shared or conserved RNA sequences of differing viral strains or classes or viral strains. Non-limiting examples of viruses include Hepatitis C Virus (HCV), Hepatitis B Virus (HBV), Human Immunodeficiency Virus type 1 (HIV-1), Human Immunodeficiency Virus type 2 (HIV-2), West Nile Virus (WNV), cytomegalovirus (CMV), respiratory syncytial virus (RSV), influenza virus, rhinovirus, papillomavirus (HPV), Herpes Simplex Virus (HSV), severe acute respiratory virus (SARS), and other viruses such as HTLV.

[0459] In one embodiment, a multifunctional short interfering nucleic acid (multifunctional siNA) of the invention comprises a first region and a second region, wherein the first region comprises a nucleotide sequence complementary to a viral RNA encoding one or more viruses (e.g., one or more strains of virus) and the second region comprises a nucleotide sequence complementary to a viral RNA encoding one or more interferon agonist proteins. In one embodiment, the first region can comprise a nucleotide sequence complementary to shared or conserved RNA sequences of differing viral strains or classes or viral strains. Non-limiting examples of viruses include Hepatitis C Virus (HCV), Hepatitis B Virus (HBV), Human Immunodeficiency Virus type 1 (HIV-1), Human Immunodeficiency Virus type 2 (HIV-2), West Nile Virus (WNV), cytomegalovirus (CMV), respiratory syncytial virus (RSV), influenza virus, rhinovirus, papillomavirus (HPV), Herpes Simplex Virus (HSV), severe acute respiratory virus (SARS), and other viruses such as HTLV. Non-limiting example of interferon agonist proteins include any protein that is capable of inhibition or suppressing RNA silencing (e.g., RNA binding proteins such as E3L or NS1 or equivalents thereof, see for example Li et al., 2004, PNAS, 101, 1350-1355)

[0460] In one embodiment, a multifunctional short interfering nucleic acid (multifunctional siNA) of the invention comprises a first region and a second region, wherein the first region comprises nucleotide sequence complementary to a viral RNA and the second region comprises nucleotide sequence complementary to a cellular RNA that is involved in viral infection and/or replication. Non-limiting examples of viruses include Hepatitis C Virus (HCV), Hepatitis B Virus (HBV), Human Immunodeficiency Virus type 1 (HIV-1), Human Immunodeficiency Virus type 2 (HIV-2), West Nile Virus (WNV), cytomegalovirus (CMV), respiratory syncytial virus (RSV), influenza virus, rhinovirus, papillomavirus (HPV), Herpes Simplex Virus (HSV), severe acute respiratory virus (SARS), and other viruses such as HTLV. Non-limiting examples of cellular RNAs involved in viral infection and/or replication include cellular receptors, cell surface molecules, cellular enzymes, cellular transcription factors, and/or cytokines, second messengers, and cellular accessory molecules including, but not limited to, interferon agonist proteins (e.g., E3L or NS1 or equivalents thereof, see for example Li et al., 2004, PNAS, 101, 1350-1355), interferon regulatory factors (IRFs); cellular PKR protein kinase (PKR); human eukaryotic initiation factors 2B (e1F2B gamma and/or e1F2gamma); human DEAD Box protein (DDX3); and cellular proteins that bind to the poly(U) tract of the HCV 3′-UTR, such as polypyrimidine tract-binding protein, CD4 receptors, CXCR4 (Fusin; LESTR; NPY3R); CCR5 (CKR-5, CMKRB5); CCR3 (CC-CKR-3, CKR-3, CMKBR3); CCR2 (CCR2b, CMKBR2); CCR1 (CKR1, CMKBR1); CCR4 (CKR-4); CCR8 (ChemR1, TER1, CMKBR8); CCR9 (D6); CXCR2 (1-8RB); STRL33 (Bonzo; TYMSTR); US28; V28 (CMKBRL1, CX3CR1, GPR13); GPR1; GPR15 (BOB); Apj (AGTRL1); ChemR23 receptors, Heparan Sulfate Proteoglycans, HSPG2; SDC2; SDC4; GPC1; SDC3; SDC1; Galactoceramides; Erythrocyte-expressed Glycolipids; N-myristoyltransferase (NMT, NMT2); Glycosylation Enzymes; gp-160 Processing Enzymes (PCSK5); Ribonucleotide Reductase; Polyamine Biosynthesis enzymes; SP-1; NF-kappa B (NFKB2, RELA, and NFKB1); Tumor Necrosis Factor-alpha (TNF-alpha); Interleukin 1 alpha (IL-1 alpha); Interleukin 6 (IL-6); Phospholipase C (PLC); Protein Kinase C (PKC), Cyclophilins, (PPID, PPIA, PPIE, PPIB, PPIF, PPIG, and PPIC); Mitogen Activated Protein Kinase (MAP-Kinase, MAPK1); and Extracellular Signal-Regulated Kinase (ERK-Kinase), (see for example Schang, 2002, Journal of Antimicrobial Chemotherapy, 50, 779-792 and Ludwig et al., 2003, Trends. Mol. Med., 9, 46-52).

[0461] In one embodiment, a double stranded multifunctional siNA molecule of the invention comprises a structure having Formula MF-I:

5′-p-X Z X′-3′
3′-Y′ Z Y-p-5′

wherein each 5′-p-XZX′-3′ and 5′-p-YZY′-3′ are independently an oligonucleotide of length between about 20 nucleotides and about 300 nucleotides, preferably between about 20 and about 200 nucleotides, about 20 and about 100 nucleotides, about 20 and about 40 nucleotides, about 20 and about 40 nucleotides, about 24 and about 38 nucleotides, or about 26 and about 38 nucleotides; XZ comprises a nucleic acid sequence that is complementary to a first target nucleic acid sequence; YZ is an oligonucleotide comprising nucleic acid sequence that is complementary to a second target nucleic acid sequence; Z comprises nucleotide sequence of length about 1 to about 24 nucleotides (e.g., about 1, 2, 3, 4, 5, 6, 7, 8, 9, 10, 11, 12, 13, 14, 15, 16, 17, 18, 19, 20, 21, 22, 23, or 24 nucleotides) that is self complimentary; X comprises nucleotide sequence of length about 1 to about 100 nucleotides, preferably about 1 to about 21 nucleotides (e.g., about 1, 2, 3, 4, 5, 6, 7, 8, 9, 10, 11, 12, 13, 14, 15, 16, 17, 18, 19, 20, or 21 nucleotides) that is complementary to nucleotide sequence present in region Y′; Y comprises nucleotide sequence of length about 1 to about 100 nucleotides, preferably about 1- about 21 nucleotides (e.g., about 1, 2, 3, 4, 5, 6, 7, 8, 9, 10, 11, 12, 13, 14, 15, 16, 17, 18, 19, 20 or 21 nucleotides) that is complementary to nucleotide sequence present in region X′; each p comprises a terminal phosphate group that is independently present or absent; each XZ and YZ is independently of length sufficient to stably interact (i.e., base pair) with the first and second target nucleic acid sequence, respectively, or a portion thereof. For example, each sequence X and Y can independently comprise sequence from about 12 to about 21 or more nucleotides in length (e.g., about 12, 13, 14, 15, 16, 17, 18, 19, 20, 21, or more) that is complementary to a target nucleotide sequence in different target nucleic acid molecules, such as target RNAs or a portion thereof. In another non-limiting example, the length of the nucleotide sequence of X and Z together that is complementary to the first target nucleic acid sequence (e.g., RNA) or a portion thereof is from about 12 to about 21 or more nucleotides (e.g., about 12, 13, 14, 15, 16, 17, 18, 19, 20, 21, or more). In another non-limiting example, the length of the nucleotide sequence of Y and Z together, that is complementary to the second target nucleic acid sequence (e.g., RNA) or a portion thereof is from about 12 to about 21 or more nucleotides (e.g., about 12, 13, 14, 15, 16, 17, 18, 19, 20, 21, or more). In one embodiment, the first target nucleic acid sequence and the second target nucleic acid sequence are present in the same target nucleic acid molecule. In another embodiment, the first target nucleic acid sequence and the second target nucleic acid sequence are present in different target nucleic acid molecules. In one embodiment, Z comprises a palindrome or a repeat sequence. In one embodiment, the lengths of oligonucleotides X and X′ are identical. In another embodiment, the lengths of oligonucleotides X and X′ are not identical. In one embodiment, the lengths of oligonucleotides Y and Y′ are identical. In another embodiment, the lengths of oligonucleotides Y and Y′ are not identical. In one embodiment, the double stranded oligonucleotide construct of Formula I(a) includes one or more, specifically 1, 2, 3 or 4, mismatches, to the extent such mismatches do not significantly diminish the ability of the double stranded oligonucleotide to inhibit target gene expression.

[0462] In one embodiment, a multifunctional siNA molecule of the invention comprises a structure having Formula MF-II:

5′-p-X X′-3′
3′-Y′ Y-p-5′

wherein each 5′-p-XX′-3′ and 5′-p-YY′-3′ are independently an oligonucleotide of length between about 20 nucleotides and about 300 nucleotides, preferably between about 20 and about 200 nucleotides, about 20 and about 100 nucleotides, about 20 and about 40 nucleotides, about 20 and about 40 nucleotides, about 24 and about 38 nucleotides, or about 26 and about 38 nucleotides; X comprises a nucleic acid sequence that is complementary to a first target nucleic acid sequence; Y is an oligonucleotide comprising nucleic acid sequence that is complementary to a second target nucleic acid sequence; X comprises a nucleotide sequence of length about 1 to about 100 nucleotides, preferably about 1 to about 21 nucleotides (e.g., about 1, 2, 3, 4, 5, 6, 7, 8, 9, 10, 11, 12, 13, 14, 15, 16, 17, 18, 19, 20, or 21 nucleotides) that is complementary to nucleotide sequence present in region Y′; Y comprises nucleotide sequence of length about 1 to about 100 nucleotides, preferably about 1 to about 21 nucleotides (e.g., about 1, 2, 3, 4, 5, 6, 7, 8, 9, 10, 11, 12, 13, 14, 15, 16, 17, 18, 19, 20 or 21 nucleotides) that is complementary to nucleotide sequence present in region X′; each p comprises a terminal phosphate group that is independently present or absent; each X and Y independently is of length sufficient to stably interact (i.e., base pair) with the first and second target nucleic acid sequence, respectively, or a portion thereof. For example, each sequence X and Y can independently comprise sequence from about 12 to about 21 or more nucleotides in length (e.g., about 12, 13, 14, 15, 16, 17, 18, 19, 20, 21, or more) that is complementary to a target nucleotide sequence in different target nucleic acid molecules, such as target RNAs or a portion thereof. In one embodiment, the first target nucleic acid sequence and the second target nucleic acid sequence are present in the same target nucleic acid molecule. In another embodiment, the first target nucleic acid sequence and the second target nucleic acid sequence are present in different target nucleic acid molecules. In one embodiment, Z comprises a palindrome or a repeat sequence. In one embodiment, the lengths of oligonucleotides X and X′ are identical. In another embodiment, the lengths of oligonucleotides X and X′ are not identical. In one embodiment, the lengths of oligonucleotides Y and Y′ are identical. In another embodiment, the lengths of oligonucleotides Y and Y′ are not identical. In one embodiment, the double stranded oligonucleotide construct of Formula I(a) includes one or more, specifically 1, 2, 3 or 4, mismatches, to the extent such mismatches do not significantly diminish the ability of the double stranded oligonucleotide to inhibit target gene expression.

[0463] In one embodiment, a multifunctional siNA molecule of the invention comprises a structure having Formula MF-III:

X X′
Y′-W-Y

wherein each X, X′, Y, and Y′ is independently an oligonucleotide of length between about 15 nucleotides and about 50 nucleotides, preferably between about 18 and about 40 nucleotides, or about 19 and about 23 nucleotides; X comprises nucleotide sequence that is complementary to nucleotide sequence present in region Y′; X′ comprises nucleotide sequence that is complementary to nucleotide sequence present in region Y; each X and X′ is independently of length sufficient to stably interact (i.e., base pair) with a first and a second target nucleic acid sequence, respectively, or a portion thereof; W represents a nucleotide or non-nucleotide linker that connects sequences Y′ and Y; and the multifunctional siNA directs cleavage of the first and second target sequence via RNA interference. In one embodiment, region W connects the 3′-end of sequence Y′ with the 3′-end of sequence Y. In one embodiment, region W connects the 3′-end of sequence Y′ with the 5′-end of sequence Y. In one embodiment, region W connects the 5′-end of sequence Y′ with the 5′-end of sequence Y. In one embodiment, region W connects the 5′-end of sequence Y′ with the 3′-end of sequence Y. In one embodiment, a terminal phosphate group is present at the 5′-end of sequence X. In one embodiment, a terminal phosphate group is present at the 5′-end of sequence X′. In one embodiment, a terminal phosphate group is present at the 5′-end of sequence Y. In one embodiment, a terminal phosphate group is present at the 5′-end of sequence Y′. In one embodiment, W connects sequences Y and Y′ via a biodegradable linker. In one embodiment, W further comprises a conjugate, lable, aptamer, ligand, lipid, or polymer.

[0464] In one embodiment, a multifunctional siNA molecule of the invention comprises a structure having Formula MF-IV:

X X′
Y′-W-Y

wherein each X, X′, Y, and Y′ is independently an oligonucleotide of length between about 15 nucleotides and about 50 nucleotides, preferably between about 18 and about 40 nucleotides, or about 19 and about 23 nucleotides; X comprises nucleotide sequence that is complementary to nucleotide sequence present in region Y′; X′ comprises nucleotide sequence that is complementary to nucleotide sequence present in region Y; each Y and Y′ is independently of length sufficient to stably interact (i.e., base pair) with a first and a second target nucleic acid sequence, respectively, or a portion thereof; W represents a nucleotide or non-nucleotide linker that connects sequences Y′ and Y; and the multifunctional siNA directs cleavage of the first and second target sequence via RNA interference. In one embodiment, region W connects the 3′-end of sequence Y′ with the 3′-end of sequence Y. In one embodiment, region W connects the 3′-end of sequence Y′ with the 5′-end of sequence Y. In one embodiment, region W connects the 5′-end of sequence Y′ with the 5′-end of sequence Y. In one embodiment, region W connects the 5′-end of sequence Y′ with the 3′-end of sequence Y. In one embodiment, a terminal phosphate group is present at the 5′-end of sequence X. In one embodiment, a terminal phosphate group is present at the 5′-end of sequence X′. In one embodiment, a terminal phosphate group is present at the 5′-end of sequence Y. In one embodiment, a terminal phosphate group is present at the 5′-end of sequence Y′. In one embodiment, W connects sequences Y and Y′ via a biodegradable linker. In one embodiment, W further comprises a conjugate, lable, aptamer, ligand, lipid, or polymer.

[0465] In one embodiment, a multifunctional siNA molecule of the invention comprises a structure having Formula MF-V:

X X′
Y′-W-Y

wherein each X, X′, Y, and Y′ is independently an oligonucleotide of length between about 15 nucleotides and about 50 nucleotides, preferably between about 18 and about 40 nucleotides, or about 19 and about 23 nucleotides; X comprises nucleotide sequence that is complementary to nucleotide sequence present in region Y′; X′ comprises nucleotide sequence that is complementary to nucleotide sequence present in region Y; each X, X′, Y, or Y′ is independently of length sufficient to stably interact (i.e., base pair) with a first, second, third, or fourth target nucleic acid sequence, respectively, or a portion thereof; W represents a nucleotide or non-nucleotide linker that connects sequences Y′ and Y; and the multifunctional siNA directs cleavage of the first, second, third, and/or fourth target sequence via RNA interference. In one embodiment, region W connects the 3′-end of sequence Y′ with the 3′-end of sequence Y. In one embodiment, region W connects the 3′-end of sequence Y′ with the 5′-end of sequence Y. In one embodiment, region W connects the 5′-end of sequence Y′ with the 5′-end of sequence Y. In one embodiment, region W connects the 5′-end of sequence Y′ with the 3′-end of sequence Y. In one embodiment, a terminal phosphate group is present at the 5′-end of sequence X. In one embodiment, a terminal phosphate group is present at the 5′-end of sequence X′. In one embodiment, a terminal phosphate group is present at the 5′-end of sequence Y. In one embodiment, a terminal phosphate group is present at the 5′-end of sequence Y′. In one embodiment, W connects sequences Y and Y′ via a biodegradable linker. In one embodiment, W further comprises a conjugate, lable, aptamer, ligand, lipid, or polymer.

[0466] In one embodiment, regions X and Y of multifunctional siNA molecule of the invention (e.g., having any of Formula MF-I-MF-V), are complementary to different target nucleic acid sequences that are portions of the same target nucleic acid molecule. In one embodiment, such target nucleic acid sequences are at different locations within the coding region of a RNA transcript. In one embodiment, such target nucleic acid sequences comprise coding and non-coding regions of the same RNA transcript. In one embodiment, such target nucleic acid sequences comprise regions of alternately spliced transcripts or precursors of such alternately spliced transcripts.

[0467] In one embodiment, a multifunctional siNA molecule having any of Formula MF-I-MF-V can comprise chemical modifications as described herein without limitation, such as, for example, nucleotides having any of Formulae I-VII described herein, stabilization chemistries as described in Table IV, or any other combination of modified nucleotides and non-nucleotides as described in the various embodiments herein.

[0468] In one embodiment, the palindrome or repeat sequence or modified nucleotide (e.g., nucleotide with a modified base, such as 2-amino purine or a universal base) in Z of multifunctional siNA constructs having Formula MF-I or MF-II comprises chemically modified nucleotides that are able to interact with a portion of the target nucleic acid sequence (e.g., modified base analogs that can form Watson Crick base pairs or non-Watson Crick base pairs).

[0469] In one embodiment, a multifunctional siNA molecule of the invention, for example each strand of a multifunctional siNA having MF-I-MF-V, independently comprises about 15 to about 40 nucleotides (e.g., about 15, 16, 17, 18, 19, 20, 21, 22, 23, 24, 25, 26, 27, 28, 29, 30, 31, 32, 33, 34, 35, 36, 37, 38, 39, or 40 nucleotides). In one embodiment, a multifunctional siNA molecule of the invention comprises one or more chemical modifications. In a non-limiting example, the introduction of chemically modified nucleotides and/or non-nucleotides into nucleic acid molecules of the invention provides a powerful tool in overcoming potential limitations of in vivo stability and bioavailability inherent to unmodified RNA molecules that are delivered exogenously. For example, the use of chemically modified nucleic acid molecules can enable a lower dose of a particular nucleic acid molecule for a given therapeutic effect since chemically modified nucleic acid molecules tend to have a longer half-life in serum or in cells or tissues. Furthermore, certain chemical modifications can improve the bioavailability and/or potency of nucleic acid molecules by not only enhancing half-life but also facilitating the targeting of nucleic acid molecules to particular organs, cells or tissues and/or improving cellular uptake of the nucleic acid molecules. Therefore, even if the activity of a chemically modified nucleic acid molecule is reduced in vitro as compared to a native/unmodified nucleic acid molecule, for example when compared to an unmodified RNA molecule, the overall activity of the modified nucleic acid molecule can be greater than the native or unmodified nucleic acid molecule due to improved stability, potency, duration of effect, bioavailability and/or delivery of the molecule.

[0470] In another embodiment, the invention features multifunctional siNAs, wherein the multifunctional siNAs are assembled from two separate double-stranded siNAs, with one of the ends of each sense strand is tethered to the end of the sense strand of the other siNA molecule, such that the two antisense siNA strands are annealed to their corresponding sense strand that are tethered to each other at one end (see FIG. 112). The tethers or linkers can be nucleotide-based linkers or non-nucleotide based linkers as generally known in the art and as described herein.

[0471] In one embodiment, the invention features a multifunctional siNA, wherein the multifunctional siNA is assembled from two separate double-stranded siNAs, with the 5′-end of one sense strand of the siNA is tethered to the 5′-end of the sense strand of the other siNA molecule, such that the 5′-ends of the two antisense siNA strands, annealed to their corresponding sense strand that are tethered to each other at one end, point away (in the opposite direction) from each other (see FIG. 112 (A)). The tethers or linkers can be nucleotide-based linkers or non-nucleotide based linkers as generally known in the art and as described herein.

[0472] In one embodiment, the invention features a multifunctional siNA, wherein the multifunctional siNA is assembled from two separate double-stranded siNAs, with the 3′-end of one sense strand of the siNA is tethered to the 3′-end of the sense strand of the other siNA molecule, such that the 5′-ends of the two antisense siNA strands, annealed to their corresponding sense strand that are tethered to each other at one end, face each other (see FIG. 112 (B)). The tethers or linkers can be nucleotide-based linkers or non-nucleotide based linkers as generally known in the art and as described herein.

[0473] In one embodiment, the invention features a multifunctional siNA, wherein the multifunctional siNA is assembled from two separate double-stranded siNAs, with the 5′-end of one sense strand of the siNA is tethered to the 3′-end of the sense strand of the other siNA molecule, such that the 5′-end of the one of the antisense siNA strands annealed to their corresponding sense strand that are tethered to each other at one end, faces the 3′-end of the other antisense strand (see FIG. 112 (C-D)). The tethers or linkers can be nucleotide-based linkers or non-nucleotide based linkers as generally known in the art and as described herein.

[0474] In one embodiment, the invention features a multifunctional siNA, wherein the multifunctional siNA is assembled from two separate double-stranded siNAs, with the 5′-end of one antisense strand of the siNA is tethered to the 3′-end of the antisense strand of the other siNA molecule, such that the 5′-end of the one of the sense siNA strands annealed to their corresponding antisense sense strand that are tethered to each other at one end, faces the 3′-end of the other sense strand (see FIG. 112 (G-H)). In one embodiment, the linkage between the 5′-end of the first antisense strand and the 3′-end of the second antisense strand is designed in such a way as to be readily cleavable (e.g., biodegradable linker) such that the 5′end of each antisense strand of the multifunctional siNA has a free 5′-end suitable to mediate RNA interefence-based cleavage of the target RNA. The tethers or linkers can be nucleotide-based linkers or non-nucleotide based linkers as generally known in the art and as described herein.

[0475] In one embodiment, the invention features a multifunctional siNA, wherein the multifunctional siNA is assembled from two separate double-stranded siNAs, with the 5′-end of one antisense strand of the siNA is tethered to the 5′-end of the antisense strand of the other siNA molecule, such that the 3′-end of the one of the sense siNA strands annealed to their corresponding antisense sense strand that are tethered to each other at one end, faces the 3′-end of the other sense strand (see FIG. 112 (E)). In one embodiment, the linkage between the 5′-end of the first antisense strand and the 5′-end of the second antisense strand is designed in such a way as to be readily cleavable (e.g., biodegradable linker) such that the 5′end of each antisense strand of the multifunctional siNA has a free 5′-end suitable to mediate RNA interefence-based cleavage of the target RNA. The tethers or linkers can be nucleotide-based linkers or non-nucleotide based linkers as generally known in the art and as described herein.

[0476] In one embodiment, the invention features a multifunctional siNA, wherein the multifunctional siNA is assembled from two separate double-stranded siNAs, with the 3′-end of one antisense strand of the siNA is tethered to the 3′-end of the antisense strand of the other siNA molecule, such that the 5′-end of the one of the sense siNA strands annealed to their corresponding antisense sense strand that are tethered to each other at one end, faces the 3′-end of the other sense strand (see FIG. 112 (F)). In one embodiment, the linkage between the 5′-end of the first antisense strand and the 5′-end of the second antisense strand is designed in such a way as to be readily cleavable (e.g., biodegradable linker) such that the 5′end of each antisense strand of the multifunctional siNA has a free 5′-end suitable to mediate RNA interefence-based cleavage of the target RNA. The tethers or linkers can be nucleotide-based linkers or non-nucleotide based linkers as generally known in the art and as described herein.

[0477] There are several potential advantages and variations to this multifunctional approach. For example, when used in combination with target sites having homology, siNAs that target a sequence present in two genes (e.g. Flt-1 site 3646, which targets VEGF-R1 and R2), the design can be used to target more than two sites. A single multifunctional siNA can be for example, used to target VEGF R1 RNA and VEGF R2 RNA (using one antisense strand of the multifunctional siNA targeting of conserved sequence between to the two RNAs) and VEGF RNA (using the second antisense strand of the multifunctional siNA targeting VEGF RNA. This approach allows targeting of the cytokines and the two main receptors using a single multifunctional siNA.

Synthesis of Nucleic Acid Molecules

[0478] Synthesis of nucleic acids greater than 100 nucleotides in length is difficult using automated methods, and the therapeutic cost of such molecules is prohibitive. In this invention, small nucleic acid motifs (“small” refers to nucleic acid motifs no more than 100 nucleotides in length, preferably no more than 80 nucleotides in length, and most preferably no more than 50 nucleotides in length; e.g., individual siNA oligonucleotide sequences or siNA sequences synthesized in tandem) are preferably used for exogenous delivery. The simple structure of these molecules increases the ability of the nucleic acid to invade targeted regions of protein and/or RNA structure. Exemplary molecules of the instant invention are chemically synthesized, and others can similarly be synthesized.

[0479] Oligonucleotides (e.g., certain modified oligonucleotides or portions of oligonucleotides lacking ribonucleotides) are synthesized using protocols known in the art, for example as described in Caruthers et al., 1992, Methods in Enzymology 211, 3-19, Thompson et al., International PCT Publication No. WO 99/54459, Wincott et al., 1995, Nucleic Acids Res. 23, 2677-2684, Wincott et al., 1997, Methods Mol. Bio., 74, 59, Brennan et al., 1998, Biotechnol Bioeng., 61, 33-45, and Brennan, U.S. Pat. No. 6,001,311. All of these references are incorporated herein by reference. The synthesis of oligonucleotides makes use of common nucleic acid protecting and coupling groups, such as dimethoxytrityl at the 5′-end, and phosphoramidites at the 3′-end. In a non-limiting example, small scale syntheses are conducted on a 394 Applied Biosystems, Inc. synthesizer using a 0.2 μmol scale protocol with a 2.5 min coupling step for 2′-O-methylated nucleotides and a 45 second coupling step for 2′-deoxy nucleotides or 2′-deoxy-2′-fluoro nucleotides. Table V outlines the amounts and the contact times of the reagents used in the synthesis cycle. Alternatively, syntheses at the 0.2 μmol scale can be performed on a 96-well plate synthesizer, such as the instrument produced by Protogene (Palo Alto, Calif.) with minimal modification to the cycle. A 33-fold excess (60 μL of 0.11 M=6.6 μmol) of 2′-O-methyl phosphoramidite and a 105-fold excess of S-ethyl tetrazole (60 μL of 0.25 M=15 μmol) can be used in each coupling cycle of 2′-O-methyl residues relative to polymer-bound 5′-hydroxyl. A 22-fold excess (40 μL of 0.11 M=4.4 μmol) of deoxy phosphoramidite and a 70-fold excess of S-ethyl tetrazole (40 μL of 0.25 M=10 μmol) can be used in each coupling cycle of deoxy residues relative to polymer-bound 5′-hydroxyl. Average coupling yields on the 394 Applied Biosystems, Inc. synthesizer, determined by colorimetric quantitation of the trityl fractions, are typically 97.5-99%. Other oligonucleotide synthesis reagents for the 394 Applied Biosystems, Inc. synthesizer include the following: detritylation solution is 3% TCA in methylene chloride (ABI); capping is performed with 16% N-methyl imidazole in THF (ABI) and 10% acetic anhydride/10% 2,6-lutidine in THF (ABI); and oxidation solution is 16.9 mM I₂, 49 mM pyridine, 9% water in THF (PERSEPTIVE™). Burdick & Jackson Synthesis Grade acetonitrile is used directly from the reagent bottle. S-Ethyltetrazole solution (0.25 M in acetonitrile) is made up from the solid obtained from American International Chemical, Inc. Alternately, for the introduction of phosphorothioate linkages, Beaucage reagent (3H-1,2-Benzodithiol-3-one 1,1-dioxide, 0.05 M in acetonitrile) is used.

[0480] Deprotection of the DNA-based oligonucleotides is performed as follows: the polymer-bound trityl-on oligoribonucleotide is transferred to a 4 mL glass screw top vial and suspended in a solution of 40% aqueous methylamine (1 mL) at 65° C. for 10 minutes. After cooling to −20° C., the supernatant is removed from the polymer support. The support is washed three times with 1.0 mL of EtOH:MeCN:H2O/3:1:1, vortexed and the supernatant is then added to the first supernatant. The combined supernatants, containing the oligoribonucleotide, are dried to a white powder.

[0481] The method of synthesis used for RNA including certain siNA molecules of the invention follows the procedure as described in Usman et al., 1987, J. Am. Chem. Soc., 109, 7845; Scaringe et al., 1990, Nucleic Acids Res., 18, 5433; and Wincott et al., 1995, Nucleic Acids Res. 23, 2677-2684 Wincott et al., 1997, Methods Mol. Bio., 74, 59, and makes use of common nucleic acid protecting and coupling groups, such as dimethoxytrityl at the 5′-end, and phosphoramidites at the 3′-end. In a non-limiting example, small scale syntheses are conducted on a 394 Applied Biosystems, Inc. synthesizer using a 0.2 μmol scale protocol with a 7.5 min coupling step for alkylsilyl protected nucleotides and a 2.5 min coupling step for 2′-O-methylated nucleotides. Table V outlines the amounts and the contact times of the reagents used in the synthesis cycle. Alternatively, syntheses at the 0.2 μmol scale can be done on a 96-well plate synthesizer, such as the instrument produced by Protogene (Palo Alto, Calif.) with minimal modification to the cycle. A 33-fold excess (60 μL of 0.11 M=6.6 μmol) of 2′-O-methyl phosphoramidite and a 75-fold excess of S-ethyl tetrazole (60 μL of 0.25 M=15 μmol) can be used in each coupling cycle of 2′-O-methyl residues relative to polymer-bound 5′-hydroxyl. A 66-fold excess (120 μL of 0.11 M=13.2 μmol) of alkylsilyl (ribo) protected phosphoramidite and a 150-fold excess of S-ethyl tetrazole (120 μL of 0.25 M=30 μmol) can be used in each coupling cycle of ribo residues relative to polymer-bound 5′-hydroxyl. Average coupling yields on the 394 Applied Biosystems, Inc. synthesizer, determined by calorimetric quantitation of the trityl fractions, are typically 97.5-99%. Other oligonucleotide synthesis reagents for the 394 Applied Biosystems, Inc. synthesizer include the following: detritylation solution is 3% TCA in methylene chloride (ABI); capping is performed with 16% N-methyl imidazole in THF (ABI) and 10% acetic anhydride/10% 2,6-lutidine in THF (ABI); oxidation solution is 16.9 mM I₂, 49 mM pyridine, 9% water in THF (PERSEPTIVE™). Burdick & Jackson Synthesis Grade acetonitrile is used directly from the reagent bottle. S-Ethyltetrazole solution (0.25 M in acetonitrile) is made up from the solid obtained from American International Chemical, Inc. Alternately, for the introduction of phosphorothioate linkages, Beaucage reagent (3H-1,2-Benzodithiol-3-one 1,1-dioxide 0.05 M in acetonitrile) is used.

[0482] Deprotection of the RNA is performed using either a two-pot or one-pot protocol. For the two-pot protocol, the polymer-bound trityl-on oligoribonucleotide is transferred to a 4 mL glass screw top vial and suspended in a solution of 40% aq. methylamine (1 mL) at 65° C. for 10 minutes. After cooling to −20° C., the supernatant is removed from the polymer support. The support is washed three times with 1.0 mL of EtOH:MeCN:H2O/3:1:1, vortexed and the supernatant is then added to the first supernatant. The combined supernatants, containing the oligoribonucleotide, are dried to a white powder. The base deprotected oligoribonucleotide is resuspended in anhydrous TEA/HF/NMP solution (300 μL of a solution of 1.5 mL N-methylpyrrolidinone, 750 μL TEA and 1 mL TEA.3HF to provide a 1.4 M HF concentration) and heated to 65° C. After 1.5 h, the oligomer is quenched with 1.5 M NH₄HCO₃.

[0483] Alternatively, for the one-pot protocol, the polymer-bound trityl-on oligoribonucleotide is transferred to a 4 mL glass screw top vial and suspended in a solution of 33% ethanolic methylamine/DMSO: 1/1 (0.8 mL) at 65° C. for 15 minutes. The vial is brought to room temperature TEA.3HF (0.1 mL) is added and the vial is heated at 65° C. for 15 minutes. The sample is cooled at −20° C. and then quenched with 1.5 M NH₄HCO₃.

[0484] For purification of the trityl-on oligomers, the quenched NH₄HCO₃ solution is loaded onto a C-18 containing cartridge that had been prewashed with acetonitrile followed by 50 mM TEAA. After washing the loaded cartridge with water, the RNA is detritylated with 0.5% TFA for 13 minutes. The cartridge is then washed again with water, salt exchanged with 1 M NaCl and washed with water again. The oligonucleotide is then eluted with 30% acetonitrile.

[0485] The average stepwise coupling yields are typically >98% (Wincott et al., 1995 Nucleic Acids Res. 23, 2677-2684). Those of ordinary skill in the art will recognize that the scale of synthesis can be adapted to be larger or smaller than the example described above including but not limited to 96-well format.

[0486] Alternatively, the nucleic acid molecules of the present invention can be synthesized separately and joined together post-synthetically, for example, by ligation (Moore et al., 1992, Science 256, 9923; Draper et al., International PCT publication No. WO 93/23569; Shabarova et al., 1991, Nucleic Acids Research 19, 4247; Bellon et al., 1997, Nucleosides & Nucleotides, 16, 951; Bellon et al., 1997, Bioconjugate Chem. 8, 204), or by hybridization following synthesis and/or deprotection.

[0487] The siNA molecules of the invention can also be synthesized via a tandem synthesis methodology as described in Example 1 herein, wherein both siNA strands are synthesized as a single contiguous oligonucleotide fragment or strand separated by a cleavable linker which is subsequently cleaved to provide separate siNA fragments or strands that hybridize and permit purification of the siNA duplex. The linker can be a polynucleotide linker or a non-nucleotide linker. The tandem synthesis of siNA as described herein can be readily adapted to both multiwell/multiplate synthesis platforms such as 96 well or similarly larger multi-well platforms. The tandem synthesis of siNA as described herein can also be readily adapted to large scale synthesis platforms employing batch reactors, synthesis columns and the like.

[0488] A siNA molecule can also be assembled from two distinct nucleic acid strands or fragments wherein one fragment includes the sense region and the second fragment includes the antisense region of the RNA molecule.

[0489] The nucleic acid molecules of the present invention can be modified extensively to enhance stability by modification with nuclease resistant groups, for example, 2′-amino, 2′-C-allyl, 2′-fluoro, 2′-O-methyl, 2′-H (for a review see Usman and Cedergren, 1992, TIBS 17, 34; Usman et al., 1994, Nucleic Acids Symp. Ser. 31, 163). siNA constructs can be purified by gel electrophoresis using general methods or can be purified by high pressure liquid chromatography (HPLC; see Wincott et al., supra, the totality of which is hereby incorporated herein by reference) and re-suspended in water.

[0490] In another aspect of the invention, siNA molecules of the invention are expressed from transcription units inserted into DNA or RNA vectors. The recombinant vectors can be DNA plasmids or viral vectors. siNA expressing viral vectors can be constructed based on, but not limited to, adeno-associated virus, retrovirus, adenovirus, or alphavirus. The recombinant vectors capable of expressing the siNA molecules can be delivered as described herein, and persist in target cells. Alternatively, viral vectors can be used that provide for transient expression of siNA molecules.

Optimizing Activity of the Nucleic Acid Molecule of the Invention.

[0491] Chemically synthesizing nucleic acid molecules with modifications (base, sugar and/or phosphate) can prevent their degradation by serum ribonucleases, which can increase their potency (see e.g., Eckstein et al., International Publication No. WO 92/07065; Perrault et al., 1990 Nature 344, 565; Pieken et al., 1991, Science 253, 314; Usman and Cedergren, 1992, Trends in Biochem. Sci. 17, 334; Usman et al., International Publication No. WO 93/15187; and Rossi et al., International Publication No. WO 91/03162; Sproat, U.S. Pat. No. 5,334,711; Gold et al., U.S. Pat. No. 6,300,074; and Burgin et al., supra; all of which are incorporated by reference herein). All of the above references describe various chemical modifications that can be made to the base, phosphate and/or sugar moieties of the nucleic acid molecules described herein. Modifications that enhance their efficacy in cells, and removal of bases from nucleic acid molecules to shorten oligonucleotide synthesis times and reduce chemical requirements are desired.

[0492] There are several examples in the art describing sugar, base and phosphate modifications that can be introduced into nucleic acid molecules with significant enhancement in their nuclease stability and efficacy. For example, oligonucleotides are modified to enhance stability and/or enhance biological activity by modification with nuclease resistant groups, for example, 2′-amino, 2′-C-allyl, 2′-fluoro, 2′-O-methyl, 2′-O-allyl, 2′-H, nucleotide base modifications (for a review see Usman and Cedergren, 1992, TIBS. 17, 34; Usman et al., 1994, Nucleic Acids Symp. Ser. 31, 163; Burgin et al., 1996, Biochemistry, 35, 14090). Sugar modification of nucleic acid molecules have been extensively described in the art (see Eckstein et al., International Publication PCT No. WO 92/07065; Perrault et al. Nature, 1990, 344, 565-568; Pieken et al. Science, 1991, 253, 314-317; Usman and Cedergren, Trends in Biochem. Sci., 1992, 17, 334-339; Usman et al. International Publication PCT No. WO 93/15187; Sproat, U.S. Pat. No. 5,334,711 and Beigelman et al., 1995, J. Biol. Chem., 270, 25702; Beigelman et al., International PCT publication No. WO 97/26270; Beigelman et al., U.S. Pat. No. 5,716,824; Usman et al., U.S. Pat. No. 5,627,053; Woolf et al., International PCT Publication No. WO 98/13526; Thompson et al., U.S. Ser. No. 60/082,404 which was filed on Apr. 20, 1998; Karpeisky et al., 1998, Tetrahedron Lett., 39, 1131; Earnshaw and Gait, 1998, Biopolymers (Nucleic Acid Sciences), 48, 39-55; Verma and Eckstein, 1998, Annu. Rev. Biochem., 67, 99-134; and Burlina et al., 1997, Bioorg. Med. Chem., 5, 1999-2010; all of the references are hereby incorporated in their totality by reference herein). Such publications describe general methods and strategies to determine the location of incorporation of sugar, base and/or phosphate modifications and the like into nucleic acid molecules without modulating catalysis, and are incorporated by reference herein. In view of such teachings, similar modifications can be used as described herein to modify the siNA nucleic acid molecules of the instant invention so long as the ability of siNA to promote RNAi is cells is not significantly inhibited.

[0493] While chemical modification of oligonucleotide internucleotide linkages with phosphorothioate, phosphorodithioate, and/or 5′-methylphosphonate linkages improves stability, excessive modifications can cause some toxicity or decreased activity. Therefore, when designing nucleic acid molecules, the amount of these internucleotide linkages should be minimized. The reduction in the concentration of these linkages should lower toxicity, resulting in increased efficacy and higher specificity of these molecules.

[0494] Short interfering nucleic acid (siNA) molecules having chemical modifications that maintain or enhance activity are provided. Such a nucleic acid is also generally more resistant to nucleases than an unmodified nucleic acid. Accordingly, the in vitro and/or in vivo activity should not be significantly lowered. In cases in which modulation is the goal, therapeutic nucleic acid molecules delivered exogenously should optimally be stable within cells until translation of the target RNA has been modulated long enough to reduce the levels of the undesirable protein. This period of time varies between hours to days depending upon the disease state. Improvements in the chemical synthesis of RNA and DNA (Wincott et al., 1995, Nucleic Acids Res. 23, 2677; Caruthers et al., 1992, Methods in Enzymology 211, 3-19 (incorporated by reference herein)) have expanded the ability to modify nucleic acid molecules by introducing nucleotide modifications to enhance their nuclease stability, as described above.

[0495] In one embodiment, nucleic acid molecules of the invention include one or more (e.g., about 1, 2, 3, 4, 5, 6, 7, 8, 9, 10, or more) G-clamp nucleotides. A G-clamp nucleotide is a modified cytosine analog wherein the modifications confer the ability to hydrogen bond both Watson-Crick and Hoogsteen faces of a complementary guanine within a duplex, see for example Lin and Matteucci, 1998, J. Am. Chem. Soc., 120, 8531-8532. A single G-clamp analog substitution within an oligonucleotide can result in substantially enhanced helical thermal stability and mismatch discrimination when hybridized to complementary oligonucleotides. The inclusion of such nucleotides in nucleic acid molecules of the invention results in both enhanced affinity and specificity to nucleic acid targets, complementary sequences, or template strands. In another embodiment, nucleic acid molecules of the invention include one or more (e.g., about 1, 2, 3, 4, 5, 6, 7, 8, 9, 10, or more) LNA “locked nucleic acid” nucleotides such as a 2′,4′-C methylene bicyclo nucleotide (see for example Wengel et al., International PCT Publication No. WO 00/66604 and WO 99/14226).

[0496] In another embodiment, the invention features conjugates and/or complexes of siNA molecules of the invention. Such conjugates and/or complexes can be used to facilitate delivery of siNA molecules into a biological system, such as a cell. The conjugates and complexes provided by the instant invention can impart therapeutic activity by transferring therapeutic compounds across cellular membranes, altering the pharmacokinetics, and/or modulating the localization of nucleic acid molecules of the invention. The present invention encompasses the design and synthesis of novel conjugates and complexes for the delivery of molecules, including, but not limited to, small molecules, lipids, cholesterol, phospholipids, nucleosides, nucleotides, nucleic acids, antibodies, toxins, negatively charged polymers and other polymers, for example, proteins, peptides, hormones, carbohydrates, polyethylene glycols, or polyamines, across cellular membranes. In general, the transporters described are designed to be used either individually or as part of a multi-component system, with or without degradable linkers. These compounds are expected to improve delivery and/or localization of nucleic acid molecules of the invention into a number of cell types originating from different tissues, in the presence or absence of serum (see Sullenger and Cech, U.S. Pat. No. 5,854,038). Conjugates of the molecules described herein can be attached to biologically active molecules via linkers that are biodegradable, such as biodegradable nucleic acid linker molecules.

[0497] In one embodiment, the invention features a compound having Formula 1:

[chemical structure]

[0498] wherein each R₁, R₃, R₄, R₅, R₆, R₇ and R₈ is independently hydrogen, alkyl, substituted alkyl, aryl, substituted aryl, or a protecting group, each “n” is independently an integer from 0 to about 200, R₁₂ is a straight or branched chain alkyl, substituted alkyl, aryl, or substituted aryl, and R₂ is a siNA molecule or a portion thereof.

[0499] In one embodiment, the invention features a compound having Formula 2:

[chemical structure]

[0500] wherein each R₃, R₄, R₅, R₆ and R₇ is independently hydrogen, alkyl, substituted alkyl, aryl, substituted aryl, or a protecting group, each “n” is independently an integer from 0 to about 200, R₁₂ is a straight or branched chain alkyl, substituted alkyl, aryl, or substituted aryl, and R₁₂ is a siNA molecule or a portion thereof.

[0501] In one embodiment, the invention features a compound having Formula 3:

[chemical structure]

[0502] wherein each R₁, R₃, R₄, R₅ R₆ and R₇ is independently hydrogen, alkyl, substituted alkyl, aryl, substituted aryl, or a protecting group, each “n” is independently an integer from 0 to about 200, R₁₂ is a straight or branched chain alkyl substituted alkyl, aryl, or substituted aryl, and R₂ is a siNA molecule or a portion thereof.

[0503] In one embodiment, the invention features a compound having Formula 4:

[chemical structure]

[0504] wherein each R₃, R₄, R₅, R₆ and R₇ is independently hydrogen, alkyl, substituted alkyl, aryl, substituted aryl, or a protecting group, each “n” is independently an integer from 0 to about 200, R₂ is a siNA molecule or a portion thereof, and R₁₃ is an amino acid side chain.

[0505] In one embodiment, the invention features a compound having Formula 5:

[chemical structure]

[0506] wherein each R₁ and R₄ is independently a protecting group or hydrogen, each R₃, R₅, R₆, R₇ and R₈ is independently hydrogen, alkyl or nitrogen protecting group, each “n” is independently an integer from 0 to about 200, R₁₂ is a straight or branched chain alkyl, substituted alkyl, aryl, or substituted aryl, and each R₉ and R₁₀ is independently a nitrogen containing group, cyanoalkoxy, alkoxy, aryloxy, or alkyl group.

[0507] In one embodiment, the invention features a compound having Formula 6:

[chemical structure]

[0508] wherein each R₄, R₅, R₅ and R₇ is independently hydrogen, alkyl, substituted alkyl, aryl, substituted aryl, or a protecting group, R₂ is a siNA molecule or a portion thereof, each “n” is independently an integer from 0 to about 200, and L is a degradable linker.

[0509] In one embodiment, the invention features a compound having Formula 7:

[chemical structure]

[0510] wherein each R₁, R₃, R₄, R₅, R₆ and R₇ is independently hydrogen, alkyl, substituted alkyl, aryl, substituted aryl, or a protecting group, each “n” is independently an integer from 0 to about 200, R₁₂ is a straight or branched chain alkyl, substituted alkyl, aryl, or substituted aryl, and R₂ is a siNA molecule or a portion thereof.

[0511] In one embodiment, the invention features a compound having Formula 8:

[chemical structure]

[0512] wherein each R₁ and R₄ is independently a protecting group or hydrogen, each R₃, R₅, R₆ and R₇ is independently hydrogen, alkyl or nitrogen protecting group, each “n” is independently an integer from 0 to about 200, R₁₂ is a straight or branched chain alkyl, substituted alkyl, aryl, or substituted aryl, and each R₉ and R₁₀ is independently a nitrogen containing group, cyanoalkoxy, alkoxy, aryloxy, or alkyl group.

[0513] In one embodiment, R₁₃ of a compound of the invention comprises an alkylamino or an alkoxy group, for example, —CH₂O— or —CH(CH₂)CH₂O—.

[0514] In another embodiment, R₁₂ of a compound of the invention is an alkylhyrdroxyl, for example, —(CH₂)ₙOH, where n comprises an integer from about 1 to about 10.

[0515] In another embodiment, L of Formula 6 of the invention comprises serine, threonine, or a photolabile linkage.

[0516] In one embodiment, R₉ of a compound of the invention comprises a phosphorus protecting group, for example —OCH₂CH₂CN (oxyethylcyano).

[0517] In one embodiment, R₁₀ of a compound of the invention comprises a nitrogen containing group, for example, —N(R₁₄) wherein R₁₄ is a straight or branched chain alkyl having from about 1 to about 10 carbons.

[0518] In another embodiment, R₁₀ of a compound of the invention comprises a heterocycloalkyl or heterocycloalkenyl ring containing from about 4 to about 7 atoms, and having from about 1 to about 3 heteroatoms comprising oxygen, nitrogen, or sulfur.

[0519] In another embodiment, R₁ of a compound of the invention comprises an acid labile protecting group, such as a trityl or substituted trityl group, for example, a dimethoxytrityl or mono-methoxytrityl group.

[0520] In another embodiment, R₄ of a compound of the invention comprises a tert-butyl, Fm (fluorenyl-methoxy), or allyl group.

[0521] In one embodiment, R₆ of a compound of the invention comprises a TFA (trifluoracetyl) group.

[0522] In another embodiment, R₃, R₅ R₇ and R₈ of a compound of the invention are independently hydrogen.

[0523] In one embodiment, R₇ of a compound of the invention is independently isobutyryl, dimethylformamide, or hydrogen.

[0524] In another embodiment, R₁₂ of a compound of the invention comprises a methyl group or ethyl group.

[0525] In one embodiment, the invention features a compound having Formula 27:

[chemical structure]

[0526] wherein “n” is an integer from about 0 to about 20, R₄ is H or a cationic salt, X is a siNA molecule or a portion thereof, and R₂₄ is a sulfur containing leaving group, for example a group comprising:

[chemical structure]

[0527] In one embodiment, the invention features a compound having Formula 39:

[chemical structure]

[0528] wherein “n” is an integer from about 0 to about 20, X is a siNA molecule or a portion thereof, and P is a phosphorus containing group.

[0529] In another embodiment, a thiol containing linker of the invention is a compound having Formula 41:

[chemical structure]

[0530] wherein “n” is an integer from about 0 to about 20, P is a phosphorus containing group, for example a phosphine, phosphite, or phosphate, and R₂₄ is any alkyl, substituted alkyl, alkoxy, aryl, substituted aryl, alkenyl, substituted alkenyl, alkynyl, or substituted alkynyl group with or without additional protecting groups.

[0531] In one embodiment, the invention features a compound having Formula 43:

[chemical structure]

[0532] wherein X comprises a siNA molecule or portion thereof; W comprises a degradable nucleic acid linker; Y comprises a linker molecule or amino acid that can be present or absent; Z comprises H, OH, O-alkyl, SH, S-alkyl, alkyl, substituted alkyl, aryl, substituted aryl, amino, substituted amino, nucleotide, nucleoside, nucleic acid, oligonucleotide, amino acid, peptide, protein, lipid, phospholipid, or label; n is an integer from about 1 to about 100; and N′ is an integer from about 1 to about 20. In another embodiment, W is selected from the group consisting of amide, phosphate, phosphate ester, phosphoramidate, or thiophosphate ester linkage.

[0533] In another embodiment, the invention features a compound having Formula 44:

[chemical structure]

[0534] wherein X comprises a siNA molecule or portion thereof; W comprises a linker molecule or chemical linkage that can be present or absent; n is an integer from about 1 to about 50, and PEG represents a compound having Formula 45:

[chemical structure]

[0535] wherein Z comprises H, OH, O-alkyl, SH, S-alkyl, alkyl, substituted alkyl, aryl, substituted aryl, amino, substituted amino, nucleotide, nucleoside, nucleic acid, oligonucleotide, amino acid, peptide, protein, lipid, phospholipid, or label; and n is an integer from about 1 to about 100. In another embodiment, W is selected from the group consisting of amide, phosphate, phosphate ester, phosphoramidate, or thiophosphate ester linkage.

[0536] In another embodiment, the invention features a compound having Formula 46:

[chemical structure]

[0537] wherein X comprises a siNA molecule or portion thereof; each W independently comprises linker molecule or chemical linkage that can be present or absent, Y comprises a linker molecule or chemical linkage that can be present or absent; and PEG represents a compound having Formula 45:

[chemical structure]

[0538] wherein Z comprises H, OH, O-alkyl, SH, S-alkyl, alkyl, substituted alkyl, aryl, substituted aryl, amino, substituted amino, nucleotide, nucleoside, nucleic acid, oligonucleotide, amino acid, peptide, protein, lipid, phospholipid, or label; and n is an integer from about 1 to about 100. In another embodiment, W is selected from the group consisting of amide, phosphate, phosphate ester, phosphoramidate, or thiophosphate ester linkage.

[0539] In one embodiment, the invention features a compound having Formula 47:

[chemical structure]

[0540] wherein X comprises a siNA molecule or portion thereof; each W independently comprises a linker molecule or chemical linkage that can be the same or different and can be present or absent, Y comprises a linker molecule that can be present or absent; each Q independently comprises a hydrophobic group or phospholipid; each R₁, R₂, R₃, and R₄ independently comprises O, OH, H, alkyl, alkylhalo, O-alkyl, O-alkylcyano, S, S-alkyl, S-alkylcyano, N or substituted N, and n is an integer from about 1 to about 10. In another embodiment, W is selected from the group consisting of amide, phosphate, phosphate ester, phosphoramidate, or thiophosphate ester linkage.

[0541] In another embodiment, the invention features a compound having Formula 48:

[chemical structure]

[0542] wherein X comprises a siNA molecule or portion thereof; each W independently comprises a linker molecule or chemical linkage that can be present or absent, Y comprises a linker molecule that can be present or absent; each R₁, R₂, R₃, and R₄ independently comprises O, OH, H, alkyl, alkylhalo, O-alkyl, O-alkylcyano, S, S-alkyl, S-alkylcyano, N or substituted N, and B represents a lipophilic group, for example a saturated or unsaturated linear, branched, or cyclic alkyl group, cholesterol, or a derivative thereof. In another embodiment, W is selected from the group consisting of amide, phosphate, phosphate ester, phosphoramidate, or thiophosphate ester linkage.

[0543] In another embodiment, the invention features a compound having Formula 49:

[chemical structure]

[0544] wherein X comprises a siNA molecule or portion thereof; W comprises a linker molecule or chemical linkage that can be present or absent, Y comprises a linker molecule that can be present or absent; each R₁, R₂, R₃, and R₄ independently comprises 0, OH, H, alkyl, alkylhalo, O-alkyl, O-alkylcyano, S, S-alkyl, S-alkylcyano, N or substituted N, and B represents a lipophilic group, for example a saturated or unsaturated linear, branched, or cyclic alkyl group, cholesterol, or a derivative thereof. In another embodiment, W is selected from the group consisting of amide, phosphate, phosphate ester, phosphoramidate, or thiophosphate ester linkage.

[0545] In another embodiment, the invention features a compound having Formula 50:

[chemical structure]

[0546] wherein X comprises a siNA molecule or portion thereof; W comprises a linker molecule or chemical linkage that can be present or absent, Y comprises a linker molecule or chemical linkage that can be present or absent; and each Q independently comprises a hydrophobic group or phospholipid. In another embodiment, W is selected from the group consisting of amide, phosphate, phosphate ester, phosphoramidate, or thiophosphate ester linkage.

[0547] In one embodiment, the invention features a compound having Formula 51:

[chemical structure]

[0548] wherein X comprises a siNA molecule or portion thereof; W comprises a linker molecule or chemical linkage that can be present or absent; Y comprises a linker molecule or amino acid that can be present or absent; Z comprises H, OH, O-alkyl, SH, S-alkyl, alkyl, substituted alkyl, aryl, substituted aryl, amino, substituted amino, nucleotide, nucleoside, nucleic acid, oligonucleotide, amino acid, peptide, protein, lipid, phospholipid, or label; SG comprises a sugar, for example galactose, galactosamine, N-acetyl-galactosamine, glucose, mannose, fructose, or fucose and the respective D or L, alpha or beta isomers, and n is an integer from about 1 to about 20. In another embodiment, W is selected from the group consisting of amide, phosphate, phosphate ester, phosphoramidate, or thiophosphate ester linkage.

[0549] In another embodiment, the invention features a compound having Formula 52:

[chemical structure]

[0550] wherein X comprises a siNA molecule or portion thereof; Y comprises a linker molecule or chemical linkage that can be present or absent; each R₁, R₂, R₃, R₄, and R₅ independently comprises O, OH, H, alkyl, alkylhalo, O-alkyl, O-alkylcyano, S, S-alkyl, S-alkylcyano, N or substituted N; Z comprises H, OH, O-alkyl, SH, S-alkyl, alkyl, substituted alkyl, aryl, substituted aryl, amino, substituted amino, nucleotide, nucleoside, nucleic acid, oligonucleotide, amino acid, peptide, protein, lipid, phospholipid, or label; SG comprises a sugar, for example galactose, galactosamine, N-acetyl-galactosamine, glucose, mannose, fructose, or fucose and the respective D or L, alpha or beta isomers, n is an integer from about 1 to about 20; and N′ is an integer from about 1 to about 20. In another embodiment, X comprises a siNA molecule or a portion thereof. In another embodiment, Y is selected from the group consisting of amide, phosphate, phosphate ester, phosphoramidate, or thiophosphate ester linkage.

[0551] In another embodiment, the invention features a compound having Formula 53:

[chemical structure]

[0552] wherein B comprises H, a nucleoside base, or a non-nucleosidic base with or without protecting groups; each R₁ independently comprises O, N, S, alkyl, or substituted N; each R₂ independently comprises O, OH, H, alkyl, alkylhalo, O-alkyl, O-alkylhalo, S, N, substituted N, or a phosphorus containing group; each R₃ independently comprises N or O—N, each R₄ independently comprises O, CH₂, S, sulfone, or sulfoxy; X comprises H, a removable protecting group, a siNA molecule or a portion thereof; W comprises a linker molecule or chemical linkage that can be present or absent; SG comprises a sugar, for example galactose, galactosamine, N-acetyl-galactosamine, glucose, mannose, fructose, or fucose and the respective D or L, alpha or beta isomers, each n is independently an integer from about 1 to about 50; and N′ is an integer from about 1 to about 10. In another embodiment, W is selected from the group consisting of amide, phosphate, phosphate ester, phosphoramidate, or thiophosphate ester linkage.

[0553] In another embodiment, the invention features a compound having Formula 54:

[chemical structure]

[0554] wherein B comprises H, a nucleoside base, or a non-nucleosidic base with or without protecting groups; each R₁ independently comprises O, OH, H, alkyl, alkylhalo, O-alkyl, O-alkylhalo, S, N, substituted N, or a phosphorus containing group; X comprises H, a removable protecting group, a siNA molecule or a portion thereof; W comprises a linker molecule or chemical linkage that can be present or absent; and SG comprises a sugar, for example galactose, galactosamine, N-acetyl-galactosamine, glucose, mannose, fructose, or fucose and the respective D or L, alpha or beta isomers. In another embodiment, W is selected from the group consisting of amide, phosphate, phosphate ester, phosphoramidate, or thiophosphate ester linkage.

[0555] In one embodiment, the invention features a compound having Formula 55:

[chemical structure]

[0556] wherein each R₁ independently comprises O, N, S, alkyl, or substituted N; each R₂ independently comprises O, OH, H, alkyl, alkylhalo, O-alkyl, O-alkylhalo, S, N, substituted N, or a phosphorus containing group; each R₃ independently comprises H, OH, alkyl, substituted alkyl, or halo; X comprises H, a removable protecting group, a siNA molecule or a portion thereof; W comprises a linker molecule or chemical linkage that can be present or absent; SG comprises a sugar, for example galactose, galactosamine, N-acetyl-galactosamine, glucose, mannose, fructose, or fucose and the respective D or L, alpha or beta isomers, each n is independently an integer from about 1 to about 50; and N′ is an integer from about 1 to about 100. In another embodiment, W is selected from the group consisting of amide, phosphate, phosphate ester, phosphoramidate, or thiophosphate ester linkage.

[0557] In another embodiment, the invention features a compound having Formula 56:

[chemical structure]

[0558] wherein R₁ comprises H, alkyl, alkylhalo, N, substituted N, or a phosphorus containing group; R₂ comprises H, O, OH, alkyl, alkylhalo, halo, S, N, substituted N, or a phosphorus containing group; X comprises H, a removable protecting group, a siNA molecule or a portion thereof; W comprises a linker molecule or chemical linkage that can be present or absent; SG comprises a sugar, for example galactose, galactosamine, N-acetyl-galactosamine, glucose, mannose, fructose, or fucose and the respective D or L, alpha or beta isomers, and each n is independently an integer from about 0 to about 20. In another embodiment, W is selected from the group consisting of amide, phosphate, phosphate ester, phosphoramidate, or thiophosphate ester linkage.

[0559] In another embodiment, the invention features a compound having Formula 57: [chemical structure]
[0560] wherein R₁ can include the groups: [chemical structure]
[0561] and wherein R₂ can include the groups:

[chemical structure]

[0562] and wherein Tr is a removable protecting group, for example a trityl, monomethoxytrityl, or dimethoxytrityl; SG comprises a sugar, for example galactose, galactosamine, N-acetyl-galactosamine, glucose, mannose, fructose, or fucose and the respective D or L, alpha or beta isomers, and n is an integer from about 1 to about 20.

[0563] In one embodiment, compounds having Formula 52, 53, 54, 55, 56, and 57 are featured wherein each nitrogen adjacent to a carbonyl can independently be substituted for a carbonyl adjacent to a nitrogen or each carbonyl adjacent to a nitrogen can be substituted for a nitrogen adjacent to a carbonyl.

[0564] In another embodiment, the invention features a compound having Formula 58:

[chemical structure]

[0565] wherein X comprises a siNA molecule or portion thereof; W comprises a linker molecule or chemical linkage that can be present or absent; Y comprises a linker molecule or amino acid that can be present or absent; V comprises a signal protein or peptide, for example Human serum albumin protein, Antennapedia peptide, Kaposi fibroblast growth factor peptide, Caiman crocodylus Ig(5) light chain peptide, HIV envelope glycoprotein gp41 peptide, HIV-1 Tat peptide, Influenza hemagglutinin envelope glycoprotein peptide, or transportan A peptide; each n is independently an integer from about 1 to about 50; and N′ is an integer from about 1 to about 100. In another embodiment, W is selected from the group consisting of amide, phosphate, phosphate ester, phosphoramidate, or thiophosphate ester linkage.

[0566] In another embodiment, the invention features a compound having Formula 59:

[chemical structure]

[0567] wherein each R₁ independently comprises O, S, N, substituted N, or a phosphorus containing group; each R₂ independently comprises O, S, or N; X comprises H, amino, substituted amino, nucleotide, nucleoside, nucleic acid, oligonucleotide, or other biologically active molecule; n is an integer from about 1 to about 50, Q comprises H or a removable protecting group which can be optionally absent, each W independently comprises a linker molecule or chemical linkage that can be present or absent, and V comprises a signal protein or peptide, for example Human serum albumin protein, Antennapedia peptide, Kaposi fibroblast growth factor peptide, Caiman crocodylus Ig(5) light chain peptide, HIV envelope glycoprotein gp41 peptide, HIV-1 Tat peptide, Influenza hemagglutinin envelope glycoprotein peptide, or transportan A peptide, or a compound having Formula 45

[chemical structure]

[0568] wherein Z comprises H, OH, O-alkyl, SH, S-alkyl, alkyl, substituted alkyl, aryl, substituted aryl, amino, substituted amino, a removable protecting group, a siNA molecule or a portion thereof; and n is an integer from about 1 to about 100. In another embodiment, W is selected from the group consisting of amide, phosphate, phosphate ester, phosphoramidate, or thiophosphate ester linkage.

[0569] In another embodiment, the invention features a compound having Formula 60: [chemical structure]
wherein R₁ can include the groups: [chemical structure]
and wherein R₂ can include the groups: [chemical structure]
and wherein Tr is a removable protecting group, for example a trityl, monomethoxytrityl, or dimethoxytrityl; n is an integer from about 1 to about 50; and R₈ is a nitrogen protecting group, for example a phthaloyl, trifluoroacetyl, FMOC, or monomethoxytrityl group.

[0570] In another embodiment, the invention features a compound having Formula 61:

[chemical structure]

[0571] wherein X comprises a siNA molecule or portion thereof; each W independently comprises a linker molecule or chemical linkage that can be the same or different and can be present or absent, Y comprises a linker molecule that can be present or absent; each 5 independently comprises a signal protein or peptide, for example Human serum albumin protein, Antennapedia peptide, Kaposi fibroblast growth factor peptide, Caiman crocodylus Ig(5) light chain peptide, HIV envelope glycoprotein gp41 peptide, HIV-1 Tat peptide, Influenza hemagglutinin envelope glycoprotein peptide, or transportan A peptide; each R₁, R₂, R₃, and R₄ independently comprises O, OH, H, alkyl, alkylhalo, O-alkyl, O-alkylcyano, S, S-alkyl, S-alkylcyano, N or substituted N, and n is an integer from about 1 to about 10. In another embodiment, W is selected from the group consisting of amide, phosphate, phosphate ester, phosphoramidate, or thiophosphate ester linkage.

[0572] In another embodiment, the invention features a compound having Formula 62:

[chemical structure]

[0573] wherein X comprises a siNA molecule or portion thereof; each 5 independently comprises a signal protein or peptide, for example Human serum albumin protein, Antennapedia peptide, Kaposi fibroblast growth factor peptide, Caiman crocodylus Ig(5) light chain peptide, HIV envelope glycoprotein gp41 peptide, HIV-1 Tat peptide, Influenza hemagglutinin envelope glycoprotein peptide, or transportan A peptide; W comprises a linker molecule or chemical linkage that can be present or absent; each R₁, R₂, and R₃ independently comprises O, OH, H, alkyl, alkylhalo, O-alkyl, O-alkylcyano, S, S-alkyl, S-alkylcyano, N or substituted N, and each n is independently an integer from about 1 to about 10. In another embodiment, W is selected from the group consisting of amide, phosphate, phosphate ester, phosphoramidate, or thiophosphate ester linkage.

[0574] In another embodiment, the invention features a compound having Formula 63:

[chemical structure]

[0575] wherein X comprises a siNA molecule or portion thereof; V comprises a signal protein or peptide, for example Human serum albumin protein, Antennapedia peptide, Kaposi fibroblast growth factor peptide, Caiman crocodylus Ig(5) light chain peptide, HIV envelope glycoprotein gp41 peptide, HIV-1 Tat peptide, Influenza hemagglutinin envelope glycoprotein peptide, or transportan A peptide; W comprises a linker molecule or chemical linkage that can be present or absent; each R₁, R₂, R₃ independently comprises O, OH, H, alkyl, alkylhalo, O-alkyl, O-alkylcyano, S, S-alkyl, S-alkylcyano, N or substituted N, R₄ represents an ester, amide, or protecting group, and each n is independently an integer from about 1 to about 10. In another embodiment, W is selected from the group consisting of amide, phosphate, phosphate ester, phosphoramidate, or thiophosphate ester linkage.

[0576] In another embodiment, the invention features a compound having Formula 64:

[chemical structure]

[0577] wherein X comprises a siNA molecule or portion thereof; each W independently comprises a linker molecule or chemical linkage that can be present or absent, Y comprises a linker molecule that can be present or absent; each R₁, R₂, R₃, and R₄ independently comprises O, OH, H, alkyl, alkylhalo, O-alkyl, O-alkylcyano, S, S-alkyl, S-alkylcyano, N or substituted N, A comprises a nitrogen containing group, and B comprises a lipophilic group. In another embodiment, W is selected from the group consisting of amide, phosphate, phosphate ester, phosphoramidate, or thiophosphate ester linkage.

[0578] In another embodiment, the invention features a compound having Formula 65:

[chemical structure]

[0579] wherein X comprises a siNA molecule or portion thereof; each W independently comprises a linker molecule or chemical linkage that can be present or absent, Y comprises a linker molecule that can be present or absent; each R₁, R₂, R₃, and R independently comprises O, OH, H, alkyl, alkylhalo, O-alkyl, O-alkylcyano, S, S-alkyl, S-alkylcyano, N or substituted N, RV comprises the lipid or phospholipid component of any of Formulae 47-50, and R₆ comprises a nitrogen containing group. In another embodiment, W is selected from the group consisting of amide, phosphate, phosphate ester, phosphoramidate, or thiophosphate ester linkage.

[0580] In another embodiment, the invention features a compound having Formula 92:

[chemical structure]

[0581] wherein B comprises H, a nucleoside base, or a non-nucleosidic base with or without protecting groups; each R₁ independently comprises O, OH, H, alkyl, alkylhalo, O-alkyl, O-alkylhalo, S, N, substituted N, or a phosphorus containing group; X comprises H, a removable protecting group, amino, substituted amino, nucleotide, nucleoside, nucleic acid, oligonucleotide, enzymatic nucleic acid, amino acid, peptide, protein, lipid, phospholipid, biologically active molecule or label; W comprises a linker molecule or chemical linkage that can be present or absent; R₂ comprises O, NH, S, CO, COO, ON═C, or alkyl; R₃ comprises alkyl, alkoxy, or an aminoacyl side chain; and SG comprises a sugar, for example galactose, galactosamine, N-acetyl-galactosamine, glucose, mannose, fructose, or fucose and the respective D or L, alpha or beta isomers. In another embodiment, W is selected from the group consisting of amide, phosphate, phosphate ester, phosphoramidate, or thiophosphate ester linkage.

[0582] In another embodiment, the invention features a compound having Formula 86:

[chemical structure]

[0583] wherein R₁ comprises H, alkyl, alkylhalo, N, substituted N, or a phosphorus containing group; R₂ comprises H, O, OH, alkyl, alkylhalo, halo, S, N, substituted N, or a phosphorus containing group; X comprises H, a removable protecting group, a siNA molecule or a portion thereof; W comprises a linker molecule or chemical linkage that can be present or absent; R₃ comprises O, NH, S, CO, COO, ON═C, or alkyl; R₄ comprises alkyl, alkoxy, or an aminoacyl side chain; and SG comprises a sugar, for example galactose, galactosamine, N-acetyl-galactosamine, glucose, mannose, fructose, or fucose and the respective D or L, alpha or beta isomers, and each n is independently an integer from about 0 to about 20. In another embodiment, W is selected from the group consisting of amide, phosphate, phosphate ester, phosphoramidate, or thiophosphate ester linkage.

[0584] In another embodiment, the invention features a compound having Formula 87:

[chemical structure]

[0585] wherein X comprises a protein, peptide, antibody, lipid, phospholipid, oligosaccharide, label, biologically active molecule, for example a vitamin such as folate, vitamin A, E, B6, B12, coenzyme, antibiotic, antiviral, nucleic acid, nucleotide, nucleoside, or oligonucleotide such as an enzymatic nucleic acid, allozyme, antisense nucleic acid, siNA, 2,5-A chimera, decoy, aptamer or triplex forming oligonucleotide, or polymers such as polyethylene glycol; W comprises a linker molecule or chemical linkage that can be present or absent; and Y comprises siNA or a portion thereof; R₁ comprises H, alkyl, or substituted alkyl. In another embodiment, W is selected from the group consisting of amide, phosphate, phosphate ester, phosphoramidate, or thiophosphate ester linkage.

[0586] In another embodiment, the invention features a compound having Formula 88:

[chemical structure]

[0587] wherein X comprises a protein, peptide, antibody, lipid, phospholipid, oligosaccharide, label, biologically active molecule, for example a vitamin such as folate, vitamin A, E, B6, B12, coenzyme, antibiotic, antiviral, nucleic acid, nucleotide, nucleoside, or oligonucleotide such as an enzymatic nucleic acid, allozyme, antisense nucleic acid, siNA, 2,5-A chimera, decoy, aptamer or triplex forming oligonucleotide, or polymers such as polyethylene glycol; W comprises a linker molecule or chemical linkage that can be present or absent, and Y comprises a siNA or a portion thereof. In another embodiment, W is selected from the group consisting of amide, phosphate, phosphate ester, phosphoramidate, or thiophosphate ester linkage.

[0588] In another embodiment, the invention features a compound having Formula 99:

[chemical structure]

[0589] wherein X comprises a siNA molecule or portion thereof; each W independently comprises a linker molecule or chemical linkage that can be present or absent, Y comprises a linker molecule that can be present or absent; each R₁, R₂, R₃, and R₄ independently comprises O, OH, H, alkyl, alkylhalo, O-alkyl, O-alkylcyano, S, S-alkyl, S-alkylcyano, N or substituted N, and SG comprises a sugar, for example galactose, galactosamine, N-acetyl-galactosamine or branched derivative thereof, glucose, mannose, fructose, or fucose and the respective D or L, alpha or beta isomers. In another embodiment, W is selected from the group consisting of amide, phosphate, phosphate ester, phosphoramidate, or thiophosphate ester linkage.

[0590] In another embodiment, the invention features a compound having Formula 100:

[chemical structure]

[0591] wherein X comprises a siNA molecule or portion thereof; W comprises a linker molecule or chemical linkage that can be present or absent, Y comprises a linker molecule that can be present or absent; each R₁, R₂, R₃, and R₄ independently comprises O, OH, H, alkyl, alkylhalo, O-alkyl, O-alkylcyano, S, S-alkyl, S-alkylcyano, N or substituted N, and SG comprises a sugar, for example galactose, galactosamine, N-acetyl-galactosamine or branched derivative thereof, glucose, mannose, fructose, or fucose and the respective D or L, alpha or beta isomers. In another embodiment, W is selected from the group consisting of amide, phosphate, phosphate ester, phosphoramidate, or thiophosphate ester linkage.

[0592] In one embodiment, the SG component of any compound having Formulae 99 or 100 comprises a compound having Formula 101:

[chemical structure]

[0593] wherein Y comprises a linker molecule or chemical linkage that can be present or absent and each R₇ independently comprises an acyl group that can be present or absent, for example a acetyl group.

[0594] In one embodiment, the W-SG component of a compound having Formulae 99 comprises a compound having Formula 102:

[chemical structure]

[0595] wherein R₂ comprises O, OH, H, alkyl, alkylhalo, O-alkyl, O-alkylhalo, S, N, substituted N, a protecting group, or another compound having Formula 102; R₁ independently H, OH, alkyl, substituted alkyl, or halo and each R₇ independently comprises an acyl group that can be present or absent, for example a acetyl group, and R₃ comprises O or R₃ in Formula 99, and n is an integer from about 1 to about 20.

[0596] In one embodiment, the W-SG component of a compound having Formulae 99 comprises a compound having Formula 103:

[chemical structure]

[0597] wherein R₁ comprises H, alkyl, alkylhalo, O-alkyl, O-alkylhalo, S, N, substituted N, a protecting group, or another compound having Formula 103; each R₇ independently comprises an acyl group that can be present or absent, for example a acetyl group, and R₃ comprises H or R₃ in Formula 99, and each n is independently an integer from about 1 to about 20.

[0598] In one embodiment, the invention features a compound having Formula 104:

[chemical structure]

[0599] wherein R₃ comprises H, OH, amino, substituted amino, nucleotide, nucleoside, nucleic acid, oligonucleotide, amino acid, peptide, protein, lipid, phospholipid, label, or a portion thereof, or OR₅ where R₅ a removable protecting group, R₄ comprises O, alkyl, alkylhalo, O-alkyl, O-alkylcyano, S, S-alkyl, S-alkylcyano, N or substituted N, each R₇ independently comprises an acyl group that can be present or absent, for example a acetyl group, and each n is independently an integer from about 1 to about 20, and

[0600] wherein R₁ can include the groups:

[chemical structure]

[0601] and wherein R₂ can include the groups:

[chemical structure]

[0602] In one embodiment, the invention features a compound having Formula 105:

[chemical structure]

[0603] wherein X comprises a siNA molecule or a portion thereof, R₂ comprises O, OH, H, alkyl, alkylhalo, O-alkyl, O-alkylhalo, S, N, substituted N, a protecting group, or a nucleotide, polynucleotide, or oligonucleotide or a portion thereof; R₁ independently H, OH, alkyl, substituted alkyl, or halo and each R₇ independently comprises an acyl group that can be present or absent, for example a acetyl group, and n is an integer from about 1 to about 20.

[0604] In one embodiment, the invention features a compound having Formula 106:

[chemical structure]

[0605] wherein X comprises a siNA molecule or a portion thereof, R₁ comprises H, OH, amino, substituted amino, nucleotide, nucleoside, nucleic acid, oligonucleotide, amino acid, peptide, protein, lipid, phospholipid, label, or a portion thereof, or OR₅ where R₅ a removable protecting group, each R₇ independently comprises an acyl group that can be present or absent, for example a acetyl group, and each n is independently an integer from about 1 to about 20

[0606] In another embodiment, the invention features a compound having Formula 107:

[chemical structure]

[0607] wherein X comprises a siNA molecule or portion thereof; each W independently comprises a linker molecule or chemical linkage that can be present or absent, Y comprises a linker molecule that can be present or absent; each R₁, R₂, R₃, and R₄ independently comprises O, OH, H, alkyl, alkylhalo, O-alkyl, O-alkylcyano, S, S-alkyl, S-alkylcyano, N or substituted N, and Cholesterol comprises cholesterol or an analog, derivative, or metabolite thereof. In another embodiment, W is selected from the group consisting of amide, phosphate, phosphate ester, phosphoramidate, or thiophosphate ester linkage.

[0608] In another embodiment, the invention features a compound having Formula 108:

[chemical structure]

[0609] wherein X comprises a siNA molecule or portion thereof; W comprises a linker molecule or chemical linkage that can be present or absent, Y comprises a linker molecule that can be present or absent; each R₁, R₂, R₃, and R₄ independently comprises O, OH, H, alkyl, alkylhalo, O-alkyl, O-alkylcyano, S, S-alkyl, S-alkylcyano, N or substituted N, and Cholesterol comprises cholesterol or an analog, derivative, or metabolite thereof. In another embodiment, W is selected from the group consisting of amide, phosphate, phosphate ester, phosphoramidate, or thiophosphate ester linkage.

[0610] In one embodiment, the W-Cholesterol component of a compound having Formula 107 comprises a compound having Formula 109:

[chemical structure]

[0611] wherein R₃ comprises R₃ as described in Formula 107, and n is independently an integer from about 1 to about 20.

[0612] In one embodiment, the invention features a compound having Formula 110:

[chemical structure]

[0613] wherein R₄ comprises O, alkyl, alkylhalo, O-alkyl, O-alkylcyano, S, S-alkyl, S-alkylcyano, N or substituted N, each n is independently an integer from about 1 to about 20, and

[0614] wherein R₁ can include the groups:

[chemical structure]

[0615] and wherein R₂ can include the groups:

[chemical structure]

[0616] In one embodiment, the invention features a compound having Formula 111:

[chemical structure]

[0617] wherein X comprises a siNA molecule or portion thereof; W comprises a linker molecule or chemical linkage that can be present or absent, and n is an integer from about 1 to about 20. In another embodiment, W is selected from the group consisting of amide, phosphate, phosphate ester, phosphoramidate, or thiophosphate ester linkage.

[0618] In one embodiment, the invention features a compound having Formula 112:

[chemical structure]

[0619] wherein n is an integer from about 1 to about 20. In another embodiment, a compound having Formula 112 is used to generate a compound having Formula 111 via NHS ester mediated coupling with a biologically active molecule, such as a siNA molecule or a portion thereof. In a non-limiting example, the NHS ester coupling can be effectuated via attachment to a free amine present in the siNA molecule, such as an amino linker molecule present on a nucleic acid sugar (e.g., 2′-amino linker) or base (e.g., C5 alkyl amine linker) component of the siNA molecule.

[0620] In one embodiment, the invention features a compound having Formula 113:

[chemical structure]

[0621] wherein R₃ comprises H, OH, amino, substituted amino, nucleotide, nucleoside, nucleic acid, oligonucleotide, amino acid, peptide, protein, lipid, phospholipid, label, or a portion thereof, or OR₅ where R₅ a removable protecting group, R₄ comprises O, alkyl, alkylhalo, O-alkyl, O-alkylcyano, S, S-alkyl, S-alkylcyano, N or substituted N, each n is independently an integer from about 1 to about 20, and

[0622] wherein R₁ can include the groups:

[chemical structure]

[0623] and wherein R₂ can include the groups:

[chemical structure]

[0624] In another embodiment, a compound having Formula 113 is used to generate a compound having Formula 111 via phosphoramidite mediated coupling with a biologically active molecule, such as a siNA molecule or a portion thereof.

[0625] In one embodiment, the invention features a compound having Formula 114:

[chemical structure]

[0626] wherein X comprises a siNA molecule or portion thereof; W comprises a linker molecule or chemical linkage that can be present or absent, and n is an integer from about 1 to about 20. In another embodiment, W is selected from the group consisting of amide, phosphate, phosphate ester, phosphoramidate, or thiophosphate ester linkage.

[0627] In one embodiment, the invention features a compound having Formula 115:

[chemical structure]

[0628] wherein X comprises a siNA molecule or portion thereof; W comprises a linker molecule or chemical linkage that can be present or absent, R₃ comprises H, OH, amino, substituted amino, nucleotide, nucleoside, nucleic acid, oligonucleotide, amino acid, peptide, protein, lipid, phospholipid, label, or a portion thereof, or OR₅ where R₅ a removable protecting group, and each n is independently an integer from about 1 to about 20. In another embodiment, W is selected from the group consisting of amide, phosphate, phosphate ester, phosphoramidate, or thiophosphate ester linkage.

[0629] In one embodiment, the invention features a compound having Formula 116:

[chemical structure]

[0630] wherein R₃ comprises H, OH, amino, substituted amino, nucleotide, nucleoside, nucleic acid, oligonucleotide, amino acid, peptide, protein, lipid, phospholipid, label, or a portion thereof, or OR₅ where R₅ a removable protecting group, R₄ comprises O, alkyl, alkylhalo, O-alkyl, O-alkylcyano, S, S-alkyl, S-alkylcyano, N or substituted N, each n is independently an integer from about 1 to about 20, and

[0631] wherein R₁ can include the groups:

[chemical structure]

[0632] and wherein R₂ can include the groups:

[chemical structure]

[0633] In another embodiment, a compound having Formula 116 is used to generate a compound having Formula 114 or 115 via phosphoramidite mediated coupling with a biologically active molecule, such as a siNA molecule or a portion thereof.

[0634] In one embodiment, the invention features a compound having Formula 117:

[chemical structure]

[0635] wherein R₃ comprises H, OH, amino, substituted amino, nucleotide, nucleoside, nucleic acid, oligonucleotide, amino acid, peptide, protein, lipid, phospholipid, label, or a portion thereof, or OR₅ where R₅ a removable protecting group, R₄ comprises O, alkyl, alkylhalo, O-alkyl, O-alkylcyano, S, S-alkyl, S-alkylcyano, N or substituted N, each R₇ independently comprises an acyl group that can be present or absent, for example a acetyl group, each n is independently an integer from about 1 to about 20, and

[0636] wherein R₁ can include the groups:

[chemical structure]

[0637] and wherein R₂ can include the groups:

[chemical structure]

[0638] In another embodiment, a compound having Formula 117 is used to generate a compound having Formula 105 via phosphoramidite mediated coupling with a biologically active molecule, such as a siNA molecule or a portion thereof.

[0639] In one embodiment, the invention features a compound having Formula 118:

[chemical structure]

[0640] wherein X comprises a siNA molecule or portion thereof; W comprises a linker molecule or chemical linkage that can be present or absent, R₃ comprises H, OH, amino, substituted amino, nucleotide, nucleoside, nucleic acid, oligonucleotide, amino acid, peptide, protein, lipid, phospholipid, label, or a portion thereof, or OR₅ where R₅ a removable protecting group, each R₇ independently comprises an acyl group that can be present or absent, for example a acetyl group, and each n is independently an integer from about 1 to about 20. In another embodiment, W is selected from the group consisting of amide, phosphate, phosphate ester, phosphoramidate, or thiophosphate ester linkage.

[0641] In one embodiment, the invention features a compound having Formula 119:

[chemical structure]

[0642] wherein X comprises a siNA molecule or portion thereof; W comprises a linker molecule or chemical linkage that can be present or absent, each R₇ independently comprises an acyl group that can be present or absent, for example a acetyl group, and each n is independently an integer from about 1 to about 20. In another embodiment, W is selected from the group consisting of amide, phosphate, phosphate ester, phosphoramidate, or thiophosphate ester linkage.

[0643] In one embodiment, the invention features a compound having Formula 120:

[chemical structure]

[0644] wherein R₃ comprises H, OH, amino, substituted amino, nucleotide, nucleoside, nucleic acid, oligonucleotide, amino acid, peptide, protein, lipid, phospholipid, label, or a portion thereof, or OR₅ where R₅ a removable protecting group, R₄ comprises O, alkyl, alkylhalo, O-alkyl, O-alkylcyano, S, S-alkyl, S-alkylcyano, N or substituted N, each R₇ independently comprises an acyl group that can be present or absent, for example a acetyl group, each n is independently an integer from about 1 to about 20, and

[0645] wherein R₁ can include the groups:

[chemical structure]

[0646] and wherein R₂ can include the groups:

[chemical structure]

[0647] In another embodiment, a compound having Formula 120 is used to generate a compound having Formula 118 or 119 via phosphoramidite mediated coupling with a biologically active molecule, such as a siNA molecule or a portion thereof.

[0648] In one embodiment, the invention features a compound having Formula 121:

[chemical structure]

[0649] wherein X comprises a siNA molecule or portion thereof; W comprises a linker molecule or chemical linkage that can be present or absent, each R₇ independently comprises an acyl group that can be present or absent, for example a acetyl group, and each n is independently an integer from about 1 to about 20. In another embodiment, W is selected from the group consisting of amide, phosphate, phosphate ester, phosphoramidate, or thiophosphate ester linkage.

[0650] In one embodiment, the invention features a compound having Formula 122:

[chemical structure]

[0651] wherein R₃ comprises H, OH, amino, substituted amino, nucleotide, nucleoside, nucleic acid, oligonucleotide, amino acid, peptide, protein, lipid, phospholipid, label, or a portion thereof, or OR₅ where R₅ a removable protecting group, R₄ comprises O, alkyl, alkylhalo, O-alkyl, O-alkylcyano, S, S-alkyl, S-alkylcyano, N or substituted N, each R₇ independently comprises an acyl group that can be present or absent, for example a acetyl group, each n is independently an integer from about 1 to about 20, and

[0652] wherein R₁ can include the groups: [chemical structure]
and wherein R₂ can include the groups:

[chemical structure]

[0653] In another embodiment, a compound having Formula 122 is used to generate a compound having Formula 121 via phosphoramidite mediated coupling with a biologically active molecule, such as a siNA molecule or a portion thereof.

[0654] In one embodiment, the invention features a compound having Formula 94,
X—Y—W—Y-Z 94

[0655] wherein X comprises a siNA molecule or a portion thereof; each Y independently comprises a linker or chemical linkage that can be present or absent, W comprises a biodegradable nucleic acid linker molecule, and Z comprises a biologically active molecule, for example an enzymatic nucleic acid, allozyme, antisense nucleic acid, siNA, 2,5-A chimera, decoy, aptamer or triplex forming oligonucleotide, peptide, protein, or antibody.

[0656] In another embodiment, W of a compound having Formula 94 of the invention comprises 5′-cytidine-deoxythymidine-3′,5′-deoxythymidine-cytidine-3′, 5′-cytidine-deoxyuridine-3′,5′-deoxyuridine-cytidine-3′,5′-uridine-deoxythymidine-3′, or 5′-deoxythymidine-uridine-3′.

[0657] In yet another embodiment, W of a compound having Formula 94 of the invention comprises 5′-adenosine-deoxythymidine-3′,5′-deoxythymidine-adenosine-3′, 5′-adenosine-deoxyuridine-3′, or 5′-deoxyuridine-adenosine-3′.

[0658] In another embodiment, Y of a compound having Formula 94 of the invention comprises a phosphorus containing linkage, phosphoramidate linkage, phosphodiester linkage, phosphorothioate linkage, amide linkage, ester linkage, carbamate linkage, disulfide linkage, oxime linkage, or morpholino linkage.

[0659] In another embodiment, compounds having Formula 89 and 91 of the invention are synthesized by periodate oxidation of an N-terminal Serine or Threonine residue of a peptide or protein.

[0660] In one embodiment, X of compounds having Formulae 43, 44, 46-52, 58, 61-65, 85-88, 92, 94, 95, 99, 100, 105-108, 111, 114, 115, 118, 119, or 121 of the invention comprises a siNA molecule or a portion thereof. In one embodiment, the siNA molecule can be conjugated at the 5′ end, 3′-end, or both 5′ and 3′ ends of the sense strand or region of the siNA. In one embodiment, the siNA molecule can be conjugated at the 3′-end of the antisense strand or region of the siNA with a compound of the invention. In one embodiment, both the sense strand and antisense strands or regions of the siNA molecule are conjugated with a compound of the invention. In one embodiment, only the sense strand or region of the siNA is conjugated with a compound of the invention. In one embodiment, only the antisense strand or region of the siNA is conjugated with a compound of the invention.

[0661] In one embodiment, W and/or Y of compounds having Formulae 43, 44, 46-52, 58, 61-65, 85-88, 92, 94, 95, 99, 100, 101, 107, 108, 111, 114, 115, 118, 119, or 121 of the invention comprises a degradable or cleavable linker, for example a nucleic acid sequence comprising ribonucleotides and/or deoxynucleotides, such as a dimer, trimer, or tetramer. A non limiting example of a nucleic acid cleavable linker is an adenosine-deoxythymidine (A-dT) dimer or a cytidine-deoxythymidine (C-dT) dimer. In yet another embodiment, W and/or V of compounds having Formulae 43, 44, 48-51, 58, 63-65, 96, 99, 100, 107, 108, 111, 114, 115, 118, 119, or 121 of the invention comprises a N-hydroxy succinimide (NHS) ester linkage, oxime linkage, disulfide linkage, phosphoramidate, phosphorothioate, phosphorodithioate, phosphodiester linkage, or NHC(O), CH₃NC(O), CONH, C(O)NCH₃, S, SO, SO₂, O, NH, NCH₃ group. In another embodiment, the degradable linker, W and/or Y, of compounds having Formulae 43, 44, 46-52, 58, 61-65, 85-88, 92, 94, 95, 99, 100, 101, 107, 108, 111, 114, 115, 118, 119, or 121 of the invention comprises a linker that is susceptible to cleavage by carboxypeptidase activity.

[0662] In another embodiment, W and/or Y of Formulae 43, 44, 46-52, 58, 61-65, 85-88, 92, 94, 95, 99, 100, 101, 107, 108, 111, 114, 115, 118, 119, or 121 comprises a polyethylene glycol linker having Formula 45:

[chemical structure]

[0663] wherein Z comprises H, OH, O-alkyl, SH, S-alkyl, alkyl, substituted alkyl, aryl, substituted aryl, amino, substituted amino, nucleotide, nucleoside, nucleic acid, oligonucleotide, amino acid, peptide, protein, lipid, phospholipid, or label; and n is an integer from about 1 to about 100.

[0664] In one embodiment, the nucleic acid conjugates of the instant invention are assembled by solid phase synthesis, for example on an automated peptide synthesizer, for example a Miligen 9050 synthesizer and/or an automated oligonucleotide synthesizer such as an ABI 394, 390Z, or Pharmacia OligoProcess, OligoPilot, OligoMax, or AKTA synthesizer. In another embodiment, the nucleic acid conjugates of the invention are assembled post synthetically, for example, following solid phase oligonucleotide synthesis (see for example FIGS. 45, 50, 53, and 73).

[0665] In another embodiment, V of compounds having Formula 58-63 and 96 comprise peptides having SEQ ID NOS: 1114-1123 (Table V).

[0666] In one embodiment, the nucleic acid conjugates of the instant invention are assembled post synthetically, for example, following solid phase oligonucleotide synthesis.

[0667] The present invention provides compositions and conjugates comprising nucleosidic and non-nucleosidic derivatives. The present invention also provides nucleic acid, polynucleotide and oligonucleotide derivatives including RNA, DNA, and PNA based conjugates. The attachment of compounds of the invention to nucleosides, nucleotides, non-nucleosides, and nucleic acid molecules is provided at any position within the molecule, for example, at internucleotide linkages, nucleosidic sugar hydroxyl groups such as 5′, 3′, and 2′-hydroxyls, and/or at nucleobase positions such as amino and carbonyl groups.

[0668] The exemplary conjugates of the invention are described as compounds of the formulae herein, however, other peptide, protein, phospholipid, and poly-alkyl glycol derivatives are provided by the invention, including various analogs of the compounds of formulae 1-122, including but not limited to different isomers of the compounds described herein.

[0669] The exemplary folate conjugates of the invention are described as compounds shown by formulae herein, however, other folate and antifolate derivatives are provided by the invention, including various folate analogs of the formulae of the invention, including dihydrofloates, tetrahydrofolates, tetrahydorpterins, folinic acid, pteropolyglutamic acid, 1-deza, 3-deaza, 5-deaza, 8-deaza, 10-deaza, 1,5-deaza, 5,10 dideaza, 8,10-dideaza, and 5,8-dideaza folates, antifolates, and pteroic acids. As used herein, the term “folate” is meant to refer to folate and folate derivatives, including pteroic acid derivatives and analogs.

[0670] The present invention features compositions and conjugates to facilitate delivery of molecules into a biological system such as cells. The conjugates provided by the instant invention can impart therapeutic activity by transferring therapeutic compounds across cellular membranes. The present invention encompasses the design and synthesis of novel agents for the delivery of molecules, including but not limited to siNA molecules. In general, the transporters described are designed to be used either individually or as part of a multi-component system. The compounds of the invention generally shown in Formulae herein are expected to improve delivery of molecules into a number of cell types originating from different tissues, in the presence or absence of serum.

[0671] In another embodiment, the compounds of the invention are provided as a surface component of a lipid aggregate, such as a liposome encapsulated with the predetermined molecule to be delivered. Liposomes, which can be unilamellar or multilamellar, can introduce encapsulated material into a cell by different mechanisms. For example, the liposome can directly introduce its encapsulated material into the cell cytoplasm by fusing with the cell membrane. Alternatively, the liposome can be compartmentalized into an acidic vacuole (i.e., an endosome) and its contents released from the liposome and out of the acidic vacuole into the cellular cytoplasm.

[0672] In one embodiment the invention features a lipid aggregate formulation of the compounds described herein, including phosphatidylcholine (of varying chain length; e.g., egg yolk phosphatidylcholine), cholesterol, a cationic lipid, and 1,2-distearoyl-sn-glycero-3-phosphoethanolamine-polythyleneglycol-2000 (DSPE-PEG2000). The cationic lipid component of this lipid aggregate can be any cationic lipid known in the art such as dioleoyl 1,2,-diacyl-3-trimethylammonium-propane (DOTAP). In another embodiment this cationic lipid aggregate comprises a covalently bound compound described in any of the Formulae herein.

[0673] In another embodiment, polyethylene glycol (PEG) is covalently attached to the compounds of the present invention. The attached PEG can be any molecular weight but is preferably between 2000-50,000 daltons.

[0674] The compounds and methods of the present invention are useful for introducing nucleotides, nucleosides, nucleic acid molecules, lipids, peptides, proteins, and/or non-nucleosidic small molecules into a cell. For example, the invention can be used for nucleotide, nucleoside, nucleic acid, lipids, peptides, proteins, and/or non-nucleosidic small molecule delivery where the corresponding target site of action exists intracellularly.

[0675] In one embodiment, the compounds of the instant invention provide conjugates of molecules that can interact with cellular receptors, such as high affinity folate receptors and ASGPr receptors, and provide a number of features that allow the efficient delivery and subsequent release of conjugated compounds across biological membranes. The compounds utilize chemical linkages between the receptor ligand and the compound to be delivered of length that can interact preferentially with cellular receptors. Furthermore, the chemical linkages between the ligand and the compound to be delivered can be designed as degradable linkages, for example by utilizing a phosphate linkage that is proximal to a nucleophile, such as a hydroxyl group. Deprotonation of the hydroxyl group or an equivalent group, as a result of pH or interaction with a nuclease, can result in nucleophilic attack of the phosphate resulting in a cyclic phosphate intermediate that can be hydrolyzed. This cleavage mechanism is analogous RNA cleavage in the presence of a base or RNA nuclease. Alternately, other degradable linkages can be selected that respond to various factors such as UV irradiation, cellular nucleases, pH, temperature etc. The use of degradable linkages allows the delivered compound to be released in a predetermined system, for example in the cytoplasm of a cell, or in a particular cellular organelle.

[0676] The present invention also provides ligand derived phosphoramidites that are readily conjugated to compounds and molecules of interest. Phosphoramidite compounds of the invention permit the direct attachment of conjugates to molecules of interest without the need for using nucleic acid phosphoramidite species as scaffolds. As such, the used of phosphoramidite chemistry can be used directly in coupling the compounds of the invention to a compound of interest, without the need for other condensation reactions, such as condensation of the ligand to an amino group on the nucleic acid, for example at the N6 position of adenosine or a 2′-deoxy-2′-amino function. Additionally, compounds of the invention can be used to introduce non-nucleic acid based conjugated linkages into oligonucleotides that can provide more efficient coupling during oligonucleotide synthesis than the use of nucleic acid-based phosphoramidites. This improved coupling can take into account improved steric considerations of abasic or non-nucleosidic scaffolds bearing pendant alkyl linkages.

[0677] Compounds of the invention utilizing triphosphate groups can be utilized in the enzymatic incorporation of conjugate molecules into oligonucleotides. Such enzymatic incorporation is useful when conjugates are used in post-synthetic enzymatic conjugation or selection reactions, (see for example Matulic-Adamic et al, 2000, Bioorg. Med. Chem. Lett., 10, 1299-1302; Lee et al., 2001, NAR., 29, 1565-1573; Joyce, 1989, Gene, 82, 83-87; Beaudry et al., 1992, Science 257, 635-641; Joyce, 1992, Scientific American 267, 90-97; Breaker et al., 1994, TIBTECH 12, 268; Bartel et al., 1993, Science 261:1411-1418; Szostak, 1993, TIBS 17, 89-93; Kumar et al., 1995, FASEB J., 9, 1183; Breaker, 1996, Curr. Op. Biotech., 7, 442; Santoro et al., 1997, Proc. Natl. Acad. Sci., 94, 4262; Tang et al., 1997, RNA 3, 914; Nakamaye & Eckstein, 1994, supra; Long & Uhlenbeck, 1994, supra; Ishizaka et al., 1995, supra; Vaish et al., 1997, Biochemistry 36, 6495; Kuwabara et al., 2000, Curr. Opin. Chem. Biol., 4, 669).

[0678] The term “biodegradable linker” as used herein, refers to a nucleic acid or non-nucleic acid linker molecule that is designed as a biodegradable linker to connect one molecule to another molecule, for example, a biologically active molecule to a siNA molecule of the invention or the sense and antisense strands of a siNA molecule of the invention. The biodegradable linker is designed such that its stability can be modulated for a particular purpose, such as delivery to a particular tissue or cell type. The stability of a nucleic acid-based biodegradable linker molecule can be modulated by using various chemistries, for example combinations of ribonucleotides, deoxyribonucleotides, and chemically-modified nucleotides, such as 2′-O-methyl, 2′-fluoro, 2′-amino, 2′-O-amino, 2′-C-allyl, 2′-O-allyl, and other 2′-modified or base modified nucleotides. The biodegradable nucleic acid linker molecule can be a dimer, trimer, tetramer or longer nucleic acid molecule, for example, an oligonucleotide of about 2, 3, 4, 5, 6, 7, 8, 9, 10, 11, 12, 13, 14, 15, 16, 17, 18, 19, or 20 nucleotides in length, or can comprise a single nucleotide with a phosphorus-based linkage, for example, a phosphoramidate or phosphodiester linkage. The biodegradable nucleic acid linker molecule can also comprise nucleic acid backbone, nucleic acid sugar, or nucleic acid base modifications.

[0679] The term “biodegradable” as used herein, refers to degradation in a biological system, for example enzymatic degradation or chemical degradation.

[0680] The term “biologically active molecule” as used herein, refers to compounds or molecules that are capable of eliciting or modifying a biological response in a system. Non-limiting examples of biologically active siNA molecules either alone or in combination with other molecules contemplated by the instant invention include therapeutically active molecules such as antibodies, cholesterol, hormones, antivirals, peptides, proteins, chemotherapeutics, small molecules, vitamins, co-factors, nucleosides, nucleotides, oligonucleotides, enzymatic nucleic acids, antisense nucleic acids, triplex forming oligonucleotides, 2,5-A chimeras, siNA, dsRNA, allozymes, aptamers, decoys and analogs thereof. Biologically active molecules of the invention also include molecules capable of modulating the pharmacokinetics and/or pharmacodynamics of other biologically active molecules, for example, lipids and polymers such as polyamines, polyamides, polyethylene glycol and other polyethers.

[0681] The term “phospholipid” as used herein, refers to a hydrophobic molecule comprising at least one phosphorus group. For example, a phospholipid can comprise a phosphorus-containing group and saturated or unsaturated alkyl group, optionally substituted with OH, COOH, oxo, amine, or substituted or unsubstituted aryl groups.

[0682] The term “alkyl” as used herein refers to a saturated aliphatic hydrocarbon, including straight-chain, branched-chain “isoalkyl”, and cyclic alkyl groups. The term “alkyl” also comprises alkoxy, alkyl-thio, alkyl-thio-alkyl, alkoxyalkyl, alkylamino, alkenyl, alkynyl, alkoxy, cycloalkenyl, cycloalkyl, cycloalkylalkyl, heterocycloalkyl, heteroaryl, C1-C6 hydrocarbyl, aryl or substituted aryl groups. Preferably, the alkyl group has 1 to 12 carbons. More preferably it is a lower alkyl of from about 1 to about 7 carbons, more preferably about 1 to about 4 carbons. The alkyl group can be substituted or unsubstituted. When substituted the substituted group(s) preferably comprise hydroxy, oxy, thio, amino, nitro, cyano, alkoxy, alkyl-thio, alkyl-thio-alkyl, alkoxyalkyl, alkylamino, silyl, alkenyl, alkynyl, alkoxy, cycloalkenyl, cycloalkyl, cycloalkylalkyl, heterocycloalkyl, heteroaryl, C1-C6 hydrocarbyl, aryl or substituted aryl groups. The term “alkyl” also includes alkenyl groups containing at least one carbon-carbon double bond, including straight-chain, branched-chain, and cyclic groups. Preferably, the alkenyl group has about 2 to about 12 carbons. More preferably it is a lower alkenyl of from about 2 to about 7 carbons, more preferably about 2 to about 4 carbons. The alkenyl group can be substituted or unsubstituted. When substituted the substituted group(s) preferably comprise hydroxy, oxy, thio, amino, nitro, cyano, alkoxy, alkyl-thio, alkyl-thio-alkyl, alkoxyalkyl, alkylamino, silyl, alkenyl, alkynyl, alkoxy, cycloalkenyl, cycloalkyl, cycloalkylalkyl, heterocycloalkyl, heteroaryl, C1-C6 hydrocarbyl, aryl or substituted aryl groups. The term “alkyl” also includes alkynyl groups containing at least one carbon-carbon triple bond, including straight-chain, branched-chain, and cyclic groups. Preferably, the alkynyl group has about 2 to about 12 carbons. More preferably it is a lower alkynyl of from about 2 to about 7 carbons, more preferably about 2 to about 4 carbons. The alkynyl group can be substituted or unsubstituted. When substituted the substituted group(s) preferably comprise hydroxy, oxy, thio, amino, nitro, cyano, alkoxy, alkyl-thio, alkyl-thio-alkyl, alkoxyalkyl, alkylamino, silyl, alkenyl, alkynyl, alkoxy, cycloalkenyl, cycloalkyl, cycloalkylalkyl, heterocycloalkyl, heteroaryl, C1-C6 hydrocarbyl, aryl or substituted aryl groups. Alkyl groups or moieties of the invention can also include aryl, alkylaryl, carbocyclic aryl, heterocyclic aryl, amide and ester groups. The preferred substituent(s) of aryl groups are halogen, trihalomethyl, hydroxyl, SH, OH, cyano, alkoxy, alkyl, alkenyl, alkynyl, and amino groups. An “alkylaryl” group refers to an alkyl group (as described above) covalently joined to an aryl group (as described above). Carbocyclic aryl groups are groups wherein the ring atoms on the aromatic ring are all carbon atoms. The carbon atoms are optionally substituted. Heterocyclic aryl groups are groups having from about 1 to about 3 heteroatoms as ring atoms in the aromatic ring and the remainder of the ring atoms are carbon atoms. Suitable heteroatoms include oxygen, sulfur, and nitrogen, and include furanyl, thienyl, pyridyl, pyrrolyl, N-lower alkyl pyrrolo, pyrimidyl, pyrazinyl, imidazolyl and the like, all optionally substituted. An “amide” refers to an —C(O)—NH—R, where R is either alkyl, aryl, alkylaryl or hydrogen. An “ester” refers to an —C(O)—OR′, where R is either alkyl, aryl, alkylaryl or hydrogen.

[0683] The term “alkoxyalkyl” as used herein refers to an alkyl-O-alkyl ether, for example, methoxyethyl or ethoxymethyl.

[0684] The term “alkyl-thio-alkyl” as used herein refers to an alkyl-S-alkyl thioether, for example, methylthiomethyl or methylthioethyl.

[0685] The term “amino” as used herein refers to a nitrogen containing group as is known in the art derived from ammonia by the replacement of one or more hydrogen radicals by organic radicals. For example, the terms “aminoacyl” and “aminoalkyl” refer to specific N-substituted organic radicals with acyl and alkyl substituent groups respectively.

[0686] The term “amination” as used herein refers to a process in which an amino group or substituted amine is introduced into an organic molecule.

[0687] The term “exocyclic amine protecting moiety” as used herein refers to a nucleobase amino protecting group compatible with oligonucleotide synthesis, for example, an acyl or amide group.

[0688] The term “alkenyl” as used herein refers to a straight or branched hydrocarbon of a designed number of carbon atoms containing at least one carbon-carbon double bond. Examples of “alkenyl” include vinyl, allyl, and 2-methyl-3-heptene.

[0689] The term “alkoxy” as used herein refers to an alkyl group of indicated number of carbon atoms attached to the parent molecular moiety through an oxygen bridge. Examples of alkoxy groups include, for example, methoxy, ethoxy, propoxy and isopropoxy.

[0690] The term “alkynyl” as used herein refers to a straight or branched hydrocarbon of a designed number of carbon atoms containing at least one carbon-carbon triple bond. Examples of “alkynyl” include propargyl, propyne, and 3-hexyne.

[0691] The term “aryl” as used herein refers to an aromatic hydrocarbon ring system containing at least one aromatic ring. The aromatic ring can optionally be fused or otherwise attached to other aromatic hydrocarbon rings or non-aromatic hydrocarbon rings. Examples of aryl groups include, for example, phenyl, naphthyl, 1,2,3,4-tetrahydronaphthalene and biphenyl. Preferred examples of aryl groups include phenyl and naphthyl.

[0692] The term “cycloalkenyl” as used herein refers to a C3-C8 cyclic hydrocarbon containing at least one carbon-carbon double bond. Examples of cycloalkenyl include cyclopropenyl, cyclobutenyl, cyclopentenyl, cyclopentadiene, cyclohexenyl, 1,3-cyclohexadiene, cycloheptenyl, cycloheptatrienyl, and cyclooctenyl.

[0693] The term “cycloalkyl” as used herein refers to a C3-C8 cyclic hydrocarbon. Examples of cycloalkyl include cyclopropyl, cyclobutyl, cyclopentyl, cyclohexyl, cycloheptyl and cyclooctyl.

[0694] The term “cycloalkylalkyl,” as used herein, refers to a C3-C7 cycloalkyl group attached to the parent molecular moiety through an alkyl group, as defined above. Examples of cycloalkylalkyl groups include cyclopropylmethyl and cyclopentylethyl.

[0695] The terms “halogen” or “halo” as used herein refers to indicate fluorine, chlorine, bromine, and iodine.

[0696] The term “heterocycloalkyl,” as used herein refers to a non-aromatic ring system containing at least one heteroatom selected from nitrogen, oxygen, and sulfur. The heterocycloalkyl ring can be optionally fused to or otherwise attached to other heterocycloalkyl rings and/or non-aromatic hydrocarbon rings. Preferred heterocycloalkyl groups have from 3 to 7 members. Examples of heterocycloalkyl groups include, for example, piperazine, morpholine, piperidine, tetrahydrofuran, pyrrolidine, and pyrazole. Preferred heterocycloalkyl groups include piperidinyl, piperazinyl, morpholinyl, and pyrolidinyl.

[0697] The term “heteroaryl” as used herein refers to an aromatic ring system containing at least one heteroatom selected from nitrogen, oxygen, and sulfur. The heteroaryl ring can be fused or otherwise attached to one or more heteroaryl rings, aromatic or non-aromatic hydrocarbon rings or heterocycloalkyl rings. Examples of heteroaryl groups include, for example, pyridine, furan, thiophene, 5,6,7,8-tetrahydroisoquinoline and pyrimidine. Preferred examples of heteroaryl groups include thienyl, benzothienyl, pyridyl, quinolyl, pyrazinyl, pyrimidyl, imidazolyl, benzimidazolyl, furanyl, benzofuranyl, thiazolyl, benzothiazolyl, isoxazolyl, oxadiazolyl, isothiazolyl, benzisothiazolyl, triazolyl, tetrazolyl, pyrrolyl, indolyl, pyrazolyl, and benzopyrazolyl.

[0698] The term “C1-C6 hydrocarbyl” as used herein refers to straight, branched, or cyclic alkyl groups having 1-6 carbon atoms, optionally containing one or more carbon-carbon double or triple bonds. Examples of hydrocarbyl groups include, for example, methyl, ethyl, propyl, isopropyl, n-butyl, sec-butyl, tert-butyl, pentyl, 2-pentyl, isopentyl, neopentyl, hexyl, 2-hexyl, 3-hexyl, 3-methylpentyl, vinyl, 2-pentene, cyclopropylmethyl, cyclopropyl, cyclohexylmethyl, cyclohexyl and propargyl. When reference is made herein to C1-C6 hydrocarbyl containing one or two double or triple bonds it is understood that at least two carbons are present in the alkyl for one double or triple bond, and at least four carbons for two double or triple bonds.

[0699] The term “protecting group” as used herein, refers to groups known in the art that are readily introduced and removed from an atom, for example O, N, P, or S. Protecting groups are used to prevent undesirable reactions from taking place that can compete with the formation of a specific compound or intermediate of interest. See also “Protective Groups in Organic Synthesis”, 3rd Ed., 1999, Greene, T. W. and related publications.

[0700] The term “nitrogen protecting group,” as used herein, refers to groups known in the art that are readily introduced on to and removed from a nitrogen. Examples of nitrogen protecting groups include Boc, Cbz, benzoyl, and benzyl. See also “Protective Groups in Organic Synthesis”, 3rd Ed., 1999, Greene, T. W. and related publications.

[0701] The term “hydroxy protecting group,” or “hydroxy protection” as used herein, refers to groups known in the art that are readily introduced on to and removed from an oxygen, specifically an —OH group. Examples of hydroxy protecting groups include trityl or substituted trityl groups, such as monomethoxytrityl and dimethoxytrityl, or substituted silyl groups, such as tert-butyldimethyl, trimethylsilyl, or tert-butyldiphenyl silyl groups. See also “Protective Groups in Organic Synthesis”, 3rd Ed., 1999, Greene, T. W. and related publications.

[0702] The term “acyl” as used herein refers to —C(O)R groups, wherein R is an alkyl or aryl.

[0703] The term “phosphorus containing group” as used herein, refers to a chemical group containing a phosphorus atom. The phosphorus atom can be trivalent or pentavalent, and can be substituted with O, H, N, S, C or halogen atoms. Examples of phosphorus containing groups of the instant invention include but are not limited to phosphorus atoms substituted with O, H, N, S, C or halogen atoms, comprising phosphonate, alkylphosphonate, phosphate, diphosphate, triphosphate, pyrophosphate, phosphorothioate, phosphorodithioate, phosphoramidate, phosphoramidite groups, nucleotides and nucleic acid molecules.

[0704] The term “phosphine” or “phosphite” as used herein refers to a trivalent phosphorus species, for example compounds having Formula 97: [chemical structure]
[0705] wherein R can include the groups: [chemical structure]
[0706] and wherein S and T independently include the groups:

[chemical structure]

[0707] The term “phosphate” as used herein refers to a pentavalent phosphorus species, for example a compound having Formula 98: [chemical structure]
[0708] wherein R includes the groups:

[chemical structure]

[0709] and wherein S and T each independently can be a sulfur or oxygen atom or a group which can include:

[chemical structure]

[0710] and wherein M comprises a sulfur or oxygen atom. The phosphate of the invention can comprise a nucleotide phosphate, wherein any R, S, or T in Formula 98 comprises a linkage to a nucleic acid or nucleoside.

[0711] The term “cationic salt” as used herein refers to any organic or inorganic salt having a net positive charge, for example a triethylammonium (TEA) salt.

[0712] The term “degradable linker” as used herein, refers to linker moieties that are capable of cleavage under various conditions. Conditions suitable for cleavage can include but are not limited to pH, UV irradiation, enzymatic activity, temperature, hydrolysis, elimination, and substitution reactions, and thermodynamic properties of the linkage.

[0713] The term “photolabile linker” as used herein, refers to linker moieties as are known in the art, that are selectively cleaved under particular UV wavelengths. Compounds of the invention containing photolabile linkers can be used to deliver compounds to a target cell or tissue of interest, and can be subsequently released in the presence of a UV source.

[0714] The term “nucleic acid conjugates” as used herein, refers to nucleoside, nucleotide and oligonucleotide conjugates.

[0715] The term “lipid” as used herein, refers to any lipophilic compound. Non-limiting examples of lipid compounds include fatty acids and their derivatives, including straight chain, branched chain, saturated and unsaturated fatty acids, carotenoids, terpenes, bile acids, and steroids, including cholesterol and derivatives or analogs thereof.

[0716] The term “folate” as used herein, refers to analogs and derivatives of folic acid, for example antifolates, dihydrofloates, tetrahydrofolates, tetrahydorpterins, folinic acid, pteropolyglutamic acid, 1-deza, 3-deaza, 5-deaza, 8-deaza, 10-deaza, 1,5-deaza, 5,10 dideaza, 8,10-dideaza, and 5,8-dideaza folates, antifolates, and pteroic acid derivatives.

[0717] The term “compounds with neutral charge” as used herein, refers to compositions which are neutral or uncharged at neutral or physiological pH. Examples of such compounds are cholesterol and other steroids, cholesteryl hemisuccinate (CHEMS), dioleoyl phosphatidyl choline, distearoylphosphotidyl choline (DSPC), fatty acids such as oleic acid, phosphatidic acid and its derivatives, phosphatidyl serine, polyethylene glycol-conjugated phosphatidylamine, phosphatidylcholine, phosphatidylethanolamine and related variants, prenylated compounds including farnesol, polyprenols, tocopherol, and their modified forms, diacylsuccinyl glycerols, fusogenic or pore forming peptides, dioleoylphosphotidylethanolamine (DOPE), ceramide and the like.

[0718] The term “lipid aggregate” as used herein refers to a lipid-containing composition wherein the lipid is in the form of a liposome, micelle (non-lamellar phase) or other aggregates with one or more lipids.

[0719] The term “nitrogen containing group” as used herein refers to any chemical group or moiety comprising a nitrogen or substituted nitrogen. Non-limiting examples of nitrogen containing groups include amines, substituted amines, amides, alkylamines, amino acids such as arginine or lysine, polyamines such as spermine or spermidine, cyclic amines such as pyridines, pyrimidines including uracil, thymine, and cytosine, morpholines, phthalimides, and heterocyclic amines such as purines, including guanine and adenine.

[0720] Therapeutic nucleic acid molecules (e.g., siNA molecules) delivered exogenously optimally are stable within cells until reverse transcription of the RNA has been modulated long enough to reduce the levels of the RNA transcript. The nucleic acid molecules are resistant to nucleases in order to function as effective intracellular therapeutic agents. Improvements in the chemical synthesis of nucleic acid molecules described in the instant invention and in the art have expanded the ability to modify nucleic acid molecules by introducing nucleotide modifications to enhance their nuclease stability as described above.

[0721] In yet another embodiment, siNA molecules having chemical modifications that maintain or enhance enzymatic activity of proteins involved in RNAi are provided. Such nucleic acids are also generally more resistant to nucleases than unmodified nucleic acids. Thus, in vitro and/or in vivo the activity should not be significantly lowered.

[0722] Use of the nucleic acid-based molecules of the invention will lead to better treatment of the disease progression by affording the possibility of combination therapies (e.g., multiple siNA molecules targeted to different genes; nucleic acid molecules coupled with known small molecule modulators; or intermittent treatment with combinations of molecules, including different motifs and/or other chemical or biological molecules). The treatment of subjects with siNA molecules can also include combinations of different types of nucleic acid molecules, such as enzymatic nucleic acid molecules (ribozymes), allozymes, antisense, 2,5-A oligoadenylate, decoys, and aptamers.

[0723] In another aspect a siNA molecule of the invention comprises one or more 5′ and/or a 3′-cap structure, for example on only the sense siNA strand, the antisense siNA strand, or both siNA strands.

[0724] By “cap structure” is meant chemical modifications, which have been incorporated at either terminus of the oligonucleotide (see, for example, Adamic et al., U.S. Pat. No. 5,998,203, incorporated by reference herein). These terminal modifications protect the nucleic acid molecule from exonuclease degradation, and can help in delivery and/or localization within a cell. The cap can be present at the 5′-terminus (5′-cap) or at the 3′-terminal (3′-cap) or can be present on both termini. Non-limiting examples of the 5′-cap include, but are not limited to, glyceryl, inverted deoxy abasic residue (moiety); 4′,5′-methylene nucleotide; 1-(beta-D-erythrofuranosyl) nucleotide, 4′-thio nucleotide; carbocyclic nucleotide; 1,5-anhydrohexitol nucleotide; L-nucleotides; alpha-nucleotides; modified base nucleotide; phosphorodithioate linkage; threo-pentofuranosyl nucleotide; acyclic 3′,4′-seco nucleotide; acyclic 3,4-dihydroxybutyl nucleotide; acyclic 3,5-dihydroxypentyl nucleotide, 3′-3′-inverted nucleotide moiety; 3′-3′-inverted abasic moiety; 3′-2′-inverted nucleotide moiety; 3′-2′-inverted abasic moiety; 1,4-butanediol phosphate; 3′-phosphoramidate; hexylphosphate; aminohexyl phosphate; 3′-phosphate; 3′-phosphorothioate; phosphorodithioate; or bridging or non-bridging methylphosphonate moiety.

[0725] Non-limiting examples of the 3′-cap include, but are not limited to, glyceryl, inverted deoxy abasic residue (moiety), 4′,5′-methylene nucleotide; 1-(beta-D-erythrofuranosyl) nucleotide; 4′-thio nucleotide, carbocyclic nucleotide; 5′-amino-alkyl phosphate; 1,3-diamino-2-propyl phosphate; 3-aminopropyl phosphate; 6-aminohexyl phosphate; 1,2-aminododecyl phosphate; hydroxypropyl phosphate; 1,5-anhydrohexitol nucleotide; L-nucleotide; alpha-nucleotide; modified base nucleotide; phosphorodithioate; threo-pentofuranosyl nucleotide; acyclic 3′,4′-seco nucleotide; 3,4-dihydroxybutyl nucleotide; 3,5-dihydroxypentyl nucleotide, 5′-5′-inverted nucleotide moiety; 5′-5′-inverted abasic moiety; 5′-phosphoramidate; 5′-phosphorothioate; 1,4-butanediol phosphate; 5′-amino; bridging and/or non-bridging 5′-phosphoramidate, phosphorothioate and/or phosphorodithioate, bridging or non bridging methylphosphonate and 5′-mercapto moieties (for more details see Beaucage and Iyer, 1993, Tetrahedron 49, 1925; incorporated by reference herein).

[0726] By the term “non-nucleotide” is meant any group or compound which can be incorporated into a nucleic acid chain in the place of one or more nucleotide units, including either sugar and/or phosphate substitutions, and allows the remaining bases to exhibit their enzymatic activity. The group or compound is abasic in that it does not contain a commonly recognized nucleotide base, such as adenosine, guanine, cytosine, uracil or thymine and therefore lacks a base at the 1′-position.

[0727] By “nucleotide” as used herein is as recognized in the art to include natural bases (standard), and modified bases well known in the art. Such bases are generally located at the 1′ position of a nucleotide sugar moiety. Nucleotides generally comprise a base, sugar and a phosphate group. The nucleotides can be unmodified or modified at the sugar, phosphate and/or base moiety, (also referred to interchangeably as nucleotide analogs, modified nucleotides, non-natural nucleotides, non-standard nucleotides and other; see, for example, Usman and McSwiggen, supra; Eckstein et al., International PCT Publication No. WO 92/07065; Usman et al., International PCT Publication No. WO 93/15187; Uhlman & Peyman, supra, all are hereby incorporated by reference herein). There are several examples of modified nucleic acid bases known in the art as summarized by Limbach et al., 1994, Nucleic Acids Res. 22, 2183. Some of the non-limiting examples of base modifications that can be introduced into nucleic acid molecules include, inosine, purine, pyridin-4-one, pyridin-2-one, phenyl, pseudouracil, 2,4,6-trimethoxy benzene, 3-methyl uracil, dihydrouridine, naphthyl, aminophenyl, 5-alkylcytidines (e.g., 5-methylcytidine), 5-alkyluridines (e.g., ribothymidine), 5-halouridine (e.g., 5-bromouridine) or 6-azapyrimidines or 6-alkylpyrimidines (e.g., 6-methyluridine), propyne, and others (Burgin et al., 1996, Biochemistry, 35, 14090; Uhlman & Peyman, supra). By “modified bases” in this aspect is meant nucleotide bases other than adenine, guanine, cytosine and uracil at 1′ position or their equivalents.

[0728] In one embodiment, the invention features modified siNA molecules, with phosphate backbone modifications comprising one or more phosphorothioate, phosphonoacetate, and/or thiophosphonoacetate, phosphorodithioate, methylphosphonate, phosphotriester, morpholino, amidate carbamate, carboxymethyl, acetamidate, polyamide, sulfonate, sulfonamide, sulfamate, formacetal, thioformacetal, and/or alkylsilyl, substitutions. For a review of oligonucleotide backbone modifications, see Hunziker and Leumann, 1995, Nucleic Acid Analogues: Synthesis and Properties, in Modern Synthetic Methods, VCH, 331-417, and Mesmaeker et al., 1994, Novel Backbone Replacements for Oligonucleotides, in Carbohydrate Modifications in Antisense Research, ACS, 24-39.

[0729] By “abasic” is meant sugar moieties lacking a base or having other chemical groups in place of a base at the 1′ position, see for example Adamic et al., U.S. Pat. No. 5,998,203.

[0730] By “unmodified nucleoside” is meant one of the bases adenine, cytosine, guanine, thymine, or uracil joined to the 1′ carbon of β-D-ribo-furanose.

[0731] By “modified nucleoside” is meant any nucleotide base which contains a modification in the chemical structure of an unmodified nucleotide base, sugar and/or phosphate. Non-limiting examples of modified nucleotides are shown by Formulae I-VII and/or other modifications described herein.

[0732] In connection with 2′-modified nucleotides as described for the present invention, by “amino” is meant 2′-NH₂ or 2′-O—NH₂, which can be modified or unmodified. Such modified groups are described, for example, in Eckstein et al., U.S. Pat. No. 5,672,695 and Matulic-Adamic et al., U.S. Pat. No. 6,248,878, which are both incorporated by reference in their entireties.

[0733] Various modifications to nucleic acid siNA structure can be made to enhance the utility of these molecules. Such modifications will enhance shelf-life, half-life in vitro, stability, and ease of introduction of such oligonucleotides to the target site, e.g., to enhance penetration of cellular membranes, and confer the ability to recognize and bind to targeted cells.

Administration of Nucleic Acid Molecules

[0734] A siNA molecule of the invention can be adapted for use to treat any disease, infection or condition associated with gene expression, and other indications that can respond to the level of gene product in a cell or tissue, alone or in combination with other therapies. Non-limiting examples of such diseases and conditions include cancer or cancerous disease, infectious disease, cardiovascular disease, neurologic disease, ocular disease, prion disease, inflammatory disease, autoimmune disease, pulmonary disease, renal disease, liver disease, mitochondrial disease, endocrine disease, reproduction related diseases and conditions as are known in the art, and any other indications that can respond to the level of an expressed gene product in a cell or organism (see for example McSwiggen, International PCT Publication No. WO 03/74654). For example, a siNA molecule can comprise a delivery vehicle, including liposomes, for administration to a subject, carriers and diluents and their salts, and/or can be present in pharmaceutically acceptable formulations. Methods for the delivery of nucleic acid molecules are described in Akhtar et al., 1992, Trends Cell Bio., 2, 139; Delivery Strategies for Antisense Oligonucleotide Therapeutics, ed. Akhtar, 1995, Maurer et al., 1999, Mol. Membr. Biol., 16, 129-140; Hofland and Huang, 1999, Handb. Exp. Pharmacol., 137, 165-192; and Lee et al., 2000, ACS Symp. Ser., 752, 184-192, all of which are incorporated herein by reference. Beigelman et al., U.S. Pat. No. 6,395,713 and Sullivan et al., PCT WO 94/02595 further describe the general methods for delivery of nucleic acid molecules. These protocols can be utilized for the delivery of virtually any nucleic acid molecule. Nucleic acid molecules can be administered to cells by a variety of methods known to those of skill in the art, including, but not restricted to, encapsulation in liposomes, by iontophoresis, or by incorporation into other vehicles, such as biodegradable polymers, hydrogels, cyclodextrins (see for example Gonzalez et al., 1999, Bioconjugate Chem., 10, 1068-1074; Wang et al., International PCT publication Nos. WO 03/47518 and WO 03/46185), poly(lactic-co-glycolic)acid (PLGA) and PLCA microspheres (see for example U.S. Pat. No. 6,447,796 and US Patent Application Publication No. US 2002130430), biodegradable nanocapsules, and bioadhesive microspheres, or by proteinaceous vectors (O'Hare and Normand, International PCT Publication No. WO 00/53722). In one embodiment, nucleic acid molecules or the invention are administered via biodegradable implant materials, such as elastic shape memory polymers (see for example Lendelein and Langer, 2002, Science, 296, 1673). In another embodiment the nucleic acid molecules of the invention can also be formulated or complexed with polyethyleneimine and derivatives thereof, such as polyethyleneimine-polyethyleneglycol-N-acetylgalactosamine (PEI-PEG-GAL) or polyethyleneimine-polyethyleneglycol-tri-N-acetylgalactosamine (PEI-PEG-triGAL) derivatives. Alternatively, the nucleic acid/vehicle combination is locally delivered by direct injection or by use of an infusion pump. Direct injection of the nucleic acid molecules of the invention, whether subcutaneous, intramuscular, or intradermal, can take place using standard needle and syringe methodologies, or by needle-free technologies such as those described in Conry et al., 1999, Clin. Cancer Res., 5, 2330-2337 and Barry et al., International PCT Publication No. WO 99/31262. Many examples in the art describe CNS delivery methods of oligonucleotides by osmotic pump, (see Chun et al., 1998, Neuroscience Letters, 257, 135-138, D'Aldin et al., 1998, Mol. Brain Research, 55, 151-164, Dryden et al., 1998, J. Endocrinol., 157, 169-175, Ghirnikar et al., 1998, Neuroscience Letters, 247, 21-24) or direct infusion (Broaddus et al., 1997, Neurosurg. Focus, 3, article 4). Other routes of delivery include, but are not limited to oral (tablet or pill form) and/or intrathecal delivery (Gold, 1997, Neuroscience, 76, 1153-1158). More detailed descriptions of nucleic acid delivery and administration are provided in Sullivan et al., supra, Draper et al., PCT WO93/23569, Beigelman et al., PCT WO99/05094, and Klimuk et al., PCT WO99/04819 all of which have been incorporated by reference herein. The molecules of the instant invention can be used as pharmaceutical agents. Pharmaceutical agents prevent, modulate the occurrence, or treat (alleviate a symptom to some extent, preferably all of the symptoms) of a disease state in a subject.

[0735] In addition, the invention features the use of methods to deliver the nucleic acid molecules of the instant invention to the central nervous system and/or peripheral nervous system. Experiments have demonstrated the efficient in vivo uptake of nucleic acids by neurons. As an example of local administration of nucleic acids to nerve cells, Sommer et al., 1998, Antisense Nuc. Acid Drug Dev., 8, 75, describe a study in which a 15mer phosphorothioate antisense nucleic acid molecule to c-fos is administered to rats via microinjection into the brain. Antisense molecules labeled with tetramethylrhodamine-isothiocyanate (TRITC) or fluorescein isothiocyanate (FITC) were taken up by exclusively by neurons thirty minutes post-injection. A diffuse cytoplasmic staining and nuclear staining was observed in these cells. As an example of systemic administration of nucleic acid to nerve cells, Epa et al., 2000, Antisense Nuc. Acid Drug Dev., 10, 469, describe an in vivo mouse study in which beta-cyclodextrin-adamantane-oligonucleotide conjugates were used to target the p75 neurotrophin receptor in neuronally differentiated PC12 cells. Following a two week course of IP administration, pronounced uptake of p75 neurotrophin receptor antisense was observed in dorsal root ganglion (DRG) cells. In addition, a marked and consistent down-regulation of p75 was observed in DRG neurons. Additional approaches to the targeting of nucleic acid to neurons are described in Broaddus et al., 1998, J. Neurosurg., 88(4), 734; Karle et al., 1997, Eur. J. Pharmacol., 340(2/3), 153; Bannai et al., 1998, Brain Research, 784(1,2), 304; Rajakumar et al., 1997, Synapse, 26(3), 199; Wu-pong et al., 1999, BioPharm, 12(1), 32; Bannai et al., 1998, Brain Res. Protoc., 3(1), 83; Simantov et al., 1996, Neuroscience, 74(1), 39. Nucleic acid molecules of the invention are therefore amenable to delivery to and uptake by cells that express repeat expansion allelic variants for modulation of RE gene expression. The delivery of nucleic acid molecules of the invention, targeting RE is provided by a variety of different strategies. Traditional approaches to CNS delivery that can be used include, but are not limited to, intrathecal and intracerebroventricular administration, implantation of catheters and pumps, direct injection or perfusion at the site of injury or lesion, injection into the brain arterial system, or by chemical or osmotic opening of the blood-brain barrier. Other approaches can include the use of various transport and carrier systems, for example though the use of conjugates and biodegradable polymers. Furthermore, gene therapy approaches, for example as described in Kaplitt et al., U.S. Pat. No. 6,180,613 and Davidson, WO 04/013280, can be used to express nucleic acid molecules in the CNS.

[0736] In addition, the invention features the use of methods to deliver the nucleic acid molecules of the instant invention to hematopoietic cells, including monocytes and lymphocytes. These methods are described in detail by Hartmann et al., 1998, J. Phamacol. Exp. Ther., 285(2), 920-928; Kronenwett et al., 1998, Blood, 91(3), 852-862; Filion and Phillips, 1997, Biochim. Biophys. Acta., 1329(2), 345-356; Ma and Wei, 1996, Leuk. Res., 20(11/12), 925-930; and Bongartz et al., 1994, Nucleic Acids Research, 22(22), 4681-8. Such methods, as described above, include the use of free oligonucleotide, cationic lipid formulations, liposome formulations including pH sensitive liposomes and immunoliposomes, and bioconjugates including oligonucleotides conjugated to fusogenic peptides, for the transfection of hematopoietic cells with oligonucleotides.

[0737] In one embodiment, a compound, molecule, or composition for the treatment of ocular conditions (e.g., macular degeneration, diabetic retinopathy etc.) is administered to a subject intraocularly or by intraocular means. In another embodiment, a compound, molecule, or composition for the treatment of ocular conditions (e.g., macular degeneration, diabetic retinopathy etc.) is administered to a subject periocularly or by periocular means (see for example Ahlheim et al., International PCT publication No. WO 03/24420). In one embodiment, a siNA molecule and/or formulation or composition thereof is administered to a subject intraocularly or by intraocular means. In another embodiment, a siNA molecule and/or formulation or composition thereof is administered to a subject periocularly or by periocular means. Periocular administration generally provides a less invasive approach to administering siNA molecules and formulation or composition thereof to a subject (see for example Ahlheim et al., International PCT publication No. WO 03/24420). The use of periocular administration also minimizes the risk of retinal detachment, allows for more frequent dosing or administration, provides a clinically relevant route of administration for macular degeneration and other optic conditions, and also provides the possibility of using resevoirs (e.g., implants, pumps or other devices) for drug delivery.

[0738] In one embodiment, the siNA molecules of the invention and formulations or compositions thereof are administered directly or topically (e.g., locally) to the dermis or follicles as is generally known in the art (see for example Brand, 2001, Curr. Opin. Mol. Ther., 3, 244-8; Regnier et al., 1998, J. Drug Target, 5, 275-89; Kanikkannan, 2002, BioDrugs, 16, 339-47; Wraight et al., 2001, Pharmacol. Ther., 90, 89-104; and Preat and Dujardin, 2001, STP PharmaSciences, 11, 57-68.

[0739] In one embodiment, dermal delivery systems of the invention include, for example, aqueous and nonaqueous gels, creams, multiple emulsions, microemulsions, liposomes, ointments, aqueous and nonaqueous solutions, lotions, aerosols, hydrocarbon bases and powders, and can contain excipients such as solubilizers, permeation enhancers (e.g., fatty acids, fatty acid esters, fatty alcohols and amino acids), and hydrophilic polymers (e.g., polycarbophil and polyvinylpyrolidone). In one embodiment, the pharmaceutically acceptable carrier is a liposome or a transdermal enhancer. Examples of liposomes which can be used in this invention include the following: (1) CellFectin, 1:1.5 (M/M) liposome formulation of the cationic lipid N,NI,NII,NIII-tetramethyl-N,NI,NII,NIII-tetrapalmit-y-spermine and dioleoyl phosphatidylethanolamine (DOPE) (GIBCO BRL); (2) Cytofectin GSV, 2:1 (M/M) liposome formulation of a cationic lipid and DOPE (Glen Research); (3) DOTAP (N-[1-(2,3-dioleoyloxy)-N,N,N-tri-methyl-ammoniummethylsulfate) (Boehringer Manheim); and (4) Lipofectamine, 3:1 (M/M) liposome formulation of the polycationic lipid DOSPA and the neutral lipid DOPE (GIBCO BRL).

[0740] In one embodiment, transmucosal delivery systems of the invention include patches, tablets, suppositories, pessaries, gels and creams, and can contain excipients such as solubilizers and enhancers (e.g., propylene glycol, bile salts and amino acids), and other vehicles (e.g., polyethylene glycol, fatty acid esters and derivatives, and hydrophilic polymers such as hydroxypropylmethylcellulose and hyaluronic acid).

[0741] In one embodiment, nucleic acid molecules of the invention are administered to the central nervous system (CNS) or peripheral nervous system (PNS). Experiments have demonstrated the efficient in vivo uptake of nucleic acids by neurons. As an example of local administration of nucleic acids to nerve cells, Sommer et al., 1998, Antisense Nuc. Acid Drug Dev., 8, 75, describe a study in which a 15mer phosphorothioate antisense nucleic acid molecule to c-fos is administered to rats via microinjection into the brain. Antisense molecules labeled with tetramethylrhodamine-isothiocyanate (TRITC) or fluorescein isothiocyanate (FITC) were taken up by exclusively by neurons thirty minutes post-injection. A diffuse cytoplasmic staining and nuclear staining was observed in these cells. As an example of systemic administration of nucleic acid to nerve cells, Epa et al., 2000, Antisense Nuc. Acid Drug Dev., 10, 469, describe an in vivo mouse study in which beta-cyclodextrin-adamantane-oligonucleotide conjugates were used to target the p75 neurotrophin receptor in neuronally differentiated PC12 cells. Following a two week course of IP administration, pronounced uptake of p75 neurotrophin receptor antisense was observed in dorsal root ganglion (DRG) cells. In addition, a marked and consistent down-regulation of p75 was observed in DRG neurons. Additional approaches to the targeting of nucleic acid to neurons are described in Broaddus et al., 1998, J. Neurosurg., 88(4), 734; Karle et al., 1997, Eur. J. Pharmocol., 340(2/3), 153; Bannai et al, 1998, Brain Research, 784(1,2), 304; Rajakumar et al., 1997, Synapse, 26(3), 199; Wu-pong et al., 1999, BioPharm, 12(1), 32; Bannai et al., 1998, Brain Res. Protoc., 3(1), 83; Simantov et al., 1996, Neuroscience, 74(1), 39. Nucleic acid molecules of the invention are therefore amenable to delivery to and uptake by cells in the CNS and/or PNS.

[0742] The delivery of nucleic acid molecules of the invention to the CNS is provided by a variety of different strategies. Traditional approaches to CNS delivery that can be used include, but are not limited to, intrathecal and intracerebroventricular administration, implantation of catheters and pumps, direct injection or perfusion at the site of injury or lesion, injection into the brain arterial system, or by chemical or osmotic opening of the blood-brain barrier. Other approaches can include the use of various transport and carrier systems, for example though the use of conjugates and biodegradable polymers. Furthermore, gene therapy approaches, for example as described in Kaplitt et al., U.S. Pat. No. 6,180,613 and Davidson, WO 04/013280, can be used to express nucleic acid molecules in the CNS.

[0743] In one embodiment, the nucleic acid molecules of the invention are administered via pulmonary delivery, such as by inhalation of an aerosol or spray dried formulation administered by an inhalation device or nebulizer, providing rapid local uptake of the nucleic acid molecules into relevant pulmonary tissues. Solid particulate compositions containing respirable dry particles of micronized nucleic acid compositions can be prepared by grinding dried or lyophilized nucleic acid compositions, and then passing the micronized composition through, for example, a 400 mesh screen to break up or separate out large agglomerates. A solid particulate composition comprising the nucleic acid compositions of the invention can optionally contain a dispersant which serves to facilitate the formation of an aerosol as well as other therapeutic compounds. A suitable dispersant is lactose, which can be blended with the nucleic acid compound in any suitable ratio, such as a 1 to 1 ratio by weight.

[0744] Aerosols of liquid particles comprising a nucleic acid composition of the invention can be produced by any suitable means, such as with a nebulizer (see for example U.S. Pat. No. 4,501,729). Nebulizers are commercially available devices which transform solutions or suspensions of an active ingredient into a therapeutic aerosol mist either by means of acceleration of a compressed gas, typically air or oxygen, through a narrow venturi orifice or by means of ultrasonic agitation. Suitable formulations for use in nebulizers comprise the active ingredient in a liquid carrier in an amount of up to 40% w/w preferably less than 20% w/w of the formulation. The carrier is typically water or a dilute aqueous alcoholic solution, preferably made isotonic with body fluids by the addition of, for example, sodium chloride or other suitable salts. Optional additives include preservatives if the formulation is not prepared sterile, for example, methyl hydroxybenzoate, anti-oxidants, flavorings, volatile oils, buffering agents and emulsifiers and other formulation surfactants. The aerosols of solid particles comprising the active composition and surfactant can likewise be produced with any solid particulate aerosol generator. Aerosol generators for administering solid particulate therapeutics to a subject produce particles which are respirable, as explained above, and generate a volume of aerosol containing a predetermined metered dose of a therapeutic composition at a rate suitable for human administration. One illustrative type of solid particulate aerosol generator is an insufflator. Suitable formulations for administration by insufflation include finely comminuted powders which can be delivered by means of an insufflator. In the insufflator, the powder, e.g., a metered dose thereof effective to carry out the treatments described herein, is contained in capsules or cartridges, typically made of gelatin or plastic, which are either pierced or opened in situ and the powder delivered by air drawn through the device upon inhalation or by means of a manually-operated pump. The powder employed in the insufflator consists either solely of the active ingredient or of a powder blend comprising the active ingredient, a suitable powder diluent, such as lactose, and an optional surfactant. The active ingredient typically comprises from 0.1 to 100 w/w of the formulation. A second type of illustrative aerosol generator comprises a metered dose inhaler. Metered dose inhalers are pressurized aerosol dispensers, typically containing a suspension or solution formulation of the active ingredient in a liquified propellant. During use these devices discharge the formulation through a valve adapted to deliver a metered volume to produce a fine particle spray containing the active ingredient. Suitable propellants include certain chlorofluorocarbon compounds, for example, dichlorodifluoromethane, trichlorofluoromethane, dichlorotetrafluoroethane and mixtures thereof. The formulation can additionally contain one or more co-solvents, for example, ethanol, emulsifiers and other formulation surfactants, such as oleic acid or sorbitan trioleate, anti-oxidants and suitable flavoring agents. Other methods for pulmonary delivery are described in, for example US Patent Application No. 20040037780, and U.S. Pat. Nos. 6,592,904; 6,582,728; 6,565,885.

[0745] In one embodiment, a siNA molecule of the invention is complexed with membrane disruptive agents such as those described in U.S. Patent Application Publication No. 20010007666, incorporated by reference herein in its entirety including the drawings. In another embodiment, the membrane disruptive agent or agents and the siNA molecule are also complexed with a cationic lipid or helper lipid molecule, such as those lipids described in U.S. Pat. No. 6,235,310, incorporated by reference herein in its entirety including the drawings.

[0746] In one embodiment, siNA molecules of the invention are formulated or complexed with polyethylenimine (e.g., linear or branched PEI) and/or polyethylenimine derivatives, including for example grafted PEIs such as galactose PEI, cholesterol PEI, antibody derivatized PEI, and polyethylene glycol PEI (PEG-PEI) derivatives thereof (see for example Ogris et al., 2001, AAPA PharmSci 3, 1-11; Furgeson et al., 2003, Bioconjugate Chem., 14, 840-847; Kunath et al., 2002, Pharmaceutical Research, 19, 810-817; Choi et al., 2001, Bull. Korean Chem. Soc., 22, 46-52; Bettinger et al., 1999, Bioconjugate Chem., 10, 558-561; Peterson et al., 2002, Bioconjugate Chem., 13, 845-854; Erbacher et al., 1999, Journal of Gene Medicine Preprint, 1, 1-18; Godbey et al., 1999., PNAS USA, 96, 5177-5181; Godbey et al., 1999, Journal of Controlled Release, 60, 149-160; Diebold et al., 1999, Journal of Biological Chemistry, 274, 19087-19094; Thomas and Klibanov, 2002, PNAS USA, 99, 14640-14645; and Sagara, U.S. Pat. No. 6,586,524, incorporated by reference herein.

[0747] In one embodiment, a siNA molecule of the invention comprises a bioconjugate, for example a nucleic acid conjugate as described in Vargeese et al., U.S. Ser. No. 10/427,160, filed Apr. 30, 2003; U.S. Pat. No. 6,528,631; U.S. Pat. No. 6,335,434; U.S. Pat. No. 6,235,886; U.S. Pat. No. 6,153,737; U.S. Pat. No. 5,214,136; U.S. Pat. No. 5,138,045, all incorporated by reference herein.

[0748] Thus, the invention features a pharmaceutical composition comprising one or more nucleic acid(s) of the invention in an acceptable carrier, such as a stabilizer, buffer, and the like. The polynucleotides of the invention can be administered (e.g., RNA, DNA or protein) and introduced into a subject by any standard means, with or without stabilizers, buffers, and the like, to form a pharmaceutical composition. When it is desired to use a liposome delivery mechanism, standard protocols for formation of liposomes can be followed. The compositions of the present invention can also be formulated and used as tablets, capsules or elixirs for oral administration, suppositories for rectal administration, sterile solutions, suspensions for injectable administration, and the other compositions known in the art.

[0749] The present invention also includes pharmaceutically acceptable formulations of the compounds described. These formulations include salts of the above compounds, e.g., acid addition salts, for example, salts of hydrochloric, hydrobromic, acetic acid, and benzene sulfonic acid

[0750] A pharmacological composition or formulation refers to a composition or formulation in a form suitable for administration, e.g., systemic administration, into a cell or subject, including for example a human. Suitable forms, in part, depend upon the use or the route of entry, for example oral, transdermal, or by injection. Such forms should not prevent the composition or formulation from reaching a target cell (i.e., a cell to which the negatively charged nucleic acid is desirable for delivery). For example, pharmacological compositions injected into the blood stream should be soluble. Other factors are known in the art, and include considerations such as toxicity and forms that prevent the composition or formulation from exerting its effect.

[0751] By “systemic administration” is meant in vivo systemic absorption or accumulation of drugs in the blood stream followed by distribution throughout the entire body. Administration routes that lead to systemic absorption include, without limitation: intravenous, subcutaneous, intraperitoneal, inhalation, oral, intrapulmonary and intramuscular. Each of these administration routes exposes the siNA molecules of the invention to an accessible diseased tissue. The rate of entry of a drug into the circulation has been shown to be a function of molecular weight or size. The use of a liposome or other drug carrier comprising the compounds of the instant invention can potentially localize the drug, for example, in certain tissue types, such as the tissues of the reticular endothelial system (RES). A liposome formulation that can facilitate the association of drug with the surface of cells, such as, lymphocytes and macrophages is also useful. This approach can provide enhanced delivery of the drug to target cells by taking advantage of the specificity of macrophage and lymphocyte immune recognition of abnormal cells, such as cancer cells.

[0752] By “pharmaceutically acceptable formulation” is meant a composition or formulation that allows for the effective distribution of the nucleic acid molecules of the instant invention in the physical location most suitable for their desired activity. Non-limiting examples of agents suitable for formulation with the nucleic acid molecules of the instant invention include: P-glycoprotein inhibitors (such as Pluronic P85), which can enhance entry of drugs into the CNS (Jolliet-Riant and Tillement, 1999, Fundam. Clin. Pharmacol., 13, 16-26); biodegradable polymers, such as poly(DL-lactide-coglycolide) microspheres for sustained release delivery after intracerebral implantation (Emerich, D F et al, 1999, Cell Transplant, 8, 47-58) (Alkermes, Inc. Cambridge, Mass.); and loaded nanoparticles, such as those made of polybutylcyanoacrylate, which can deliver drugs across the blood brain barrier and can alter neuronal uptake mechanisms (Prog Neuropsychopharmacol Biol Psychiatry, 23, 941-949, 1999). Other non-limiting examples of delivery strategies for the nucleic acid molecules of the instant invention include material described in Boado et al., 1998, J. Pharm. Sci., 87, 1308-1315; Tyler et al., 1999, FEBS Lett., 421, 280-284; Pardridge et al., 1995, PNAS USA., 92, 5592-5596; Boado, 1995, Adv. Drug Delivery Rev., 15, 73-107; Aldrian-Herrada et al., 1998, Nucleic Acids Res., 26, 4910-4916; and Tyler et al., 1999, PNAS USA., 96, 7053-7058.

[0753] The invention also features the use of the composition comprising surface-modified liposomes containing poly(ethylene glycol) lipids (PEG-modified, or long-circulating liposomes or stealth liposomes). These formulations offer a method for increasing the accumulation of drugs in target tissues. This class of drug carriers resists opsonization and elimination by the mononuclear phagocytic system (MPS or RES), thereby enabling longer blood circulation times and enhanced tissue exposure for the encapsulated drug (Lasic et al. Chem. Rev. 1995, 95, 2601-2627; Ishiwata et al., Chem. Pharm. Bull. 1995, 43, 1005-1011). Such liposomes have been shown to accumulate selectively in tumors, presumably by extravasation and capture in the neovascularized target tissues (Lasic et al., Science 1995, 267, 1275-1276; Oku et al., 1995, Biochim. Biophys. Acta, 1238, 86-90). The long-circulating liposomes enhance the pharmacokinetics and pharmacodynamics of DNA and RNA, particularly compared to conventional cationic liposomes which are known to accumulate in tissues of the MPS (Liu et al, J. Biol. Chem. 1995, 42, 24864-24870; Choi et al., International PCT Publication No. WO 96/10391; Ansell et al., International PCT Publication No. WO 96/10390; Holland et al., International PCT Publication No. WO 96/10392). Long-circulating liposomes are also likely to protect drugs from nuclease degradation to a greater extent compared to cationic liposomes, based on their ability to avoid accumulation in metabolically aggressive MPS tissues such as the liver and spleen.

[0754] The present invention also includes compositions prepared for storage or administration that include a pharmaceutically effective amount of the desired compounds in a pharmaceutically acceptable carrier or diluent. Acceptable carriers or diluents for therapeutic use are well known in the pharmaceutical art, and are described, for example, in Remington's Pharmaceutical Sciences, Mack Publishing Co. (A.R. Gennaro edit. 1985), hereby incorporated by reference herein. For example, preservatives, stabilizers, dyes and flavoring agents can be provided. These include sodium benzoate, sorbic acid and esters of p-hydroxybenzoic acid. In addition, antioxidants and suspending agents can be used.

[0755] A pharmaceutically effective dose is that dose required to prevent, inhibit the occurrence, or treat (alleviate a symptom to some extent, preferably all of the symptoms) of a disease state. The pharmaceutically effective dose depends on the type of disease, the composition used, the route of administration, the type of mammal being treated, the physical characteristics of the specific mammal under consideration, concurrent medication, and other factors that those skilled in the medical arts will recognize. Generally, an amount between 0.1 mg/kg and 100 mg/kg body weight/day of active ingredients is administered dependent upon potency of the negatively charged polymer.

[0756] The nucleic acid molecules of the invention and formulations thereof can be administered orally, topically, parenterally, by inhalation or spray, or rectally in dosage unit formulations containing conventional non-toxic pharmaceutically acceptable carriers, adjuvants and/or vehicles. The term parenteral as used herein includes percutaneous, subcutaneous, intravascular (e.g., intravenous), intramuscular, or intrathecal injection or infusion techniques and the like. In addition, there is provided a pharmaceutical formulation comprising a nucleic acid molecule of the invention and a pharmaceutically acceptable carrier. One or more nucleic acid molecules of the invention can be present in association with one or more non-toxic pharmaceutically acceptable carriers and/or diluents and/or adjuvants, and if desired other active ingredients. The pharmaceutical compositions containing nucleic acid molecules of the invention can be in a form suitable for oral use, for example, as tablets, troches, lozenges, aqueous or oily suspensions, dispersible powders or granules, emulsion, hard or soft capsules, or syrups or elixirs.

[0757] Compositions intended for oral use can be prepared according to any method known to the art for the manufacture of pharmaceutical compositions and such compositions can contain one or more such sweetening agents, flavoring agents, coloring agents or preservative agents in order to provide pharmaceutically elegant and palatable preparations. Tablets contain the active ingredient in admixture with non-toxic pharmaceutically acceptable excipients that are suitable for the manufacture of tablets. These excipients can be, for example, inert diluents; such as calcium carbonate, sodium carbonate, lactose, calcium phosphate or sodium phosphate; granulating and disintegrating agents, for example, corn starch, or alginic acid; binding agents, for example starch, gelatin or acacia; and lubricating agents, for example magnesium stearate, stearic acid or talc. The tablets can be uncoated or they can be coated by known techniques. In some cases such coatings can be prepared by known techniques to delay disintegration and absorption in the gastrointestinal tract and thereby provide a sustained action over a longer period. For example, a time delay material such as glyceryl monostearate or glyceryl distearate can be employed.

[0758] Formulations for oral use can also be presented as hard gelatin capsules wherein the active ingredient is mixed with an inert solid diluent, for example, calcium carbonate, calcium phosphate or kaolin, or as soft gelatin capsules wherein the active ingredient is mixed with water or an oil medium, for example peanut oil, liquid paraffin or olive oil.

[0759] Aqueous suspensions contain the active materials in a mixture with excipients suitable for the manufacture of aqueous suspensions. Such excipients are suspending agents, for example sodium carboxymethylcellulose, methylcellulose, hydropropyl-methylcellulose, sodium alginate, polyvinylpyrrolidone, gum tragacanth and gum acacia; dispersing or wetting agents can be a naturally-occurring phosphatide, for example, lecithin, or condensation products of an alkylene oxide with fatty acids, for example polyoxyethylene stearate, or condensation products of ethylene oxide with long chain aliphatic alcohols, for example heptadecaethyleneoxycetanol, or condensation products of ethylene oxide with partial esters derived from fatty acids and a hexitol such as polyoxyethylene sorbitol monooleate, or condensation products of ethylene oxide with partial esters derived from fatty acids and hexitol anhydrides, for example polyethylene sorbitan monooleate. The aqueous suspensions can also contain one or more preservatives, for example ethyl, or n-propyl p-hydroxybenzoate, one or more coloring agents, one or more flavoring agents, and one or more sweetening agents, such as sucrose or saccharin.

[0760] Oily suspensions can be formulated by suspending the active ingredients in a vegetable oil, for example arachis oil, olive oil, sesame oil or coconut oil, or in a mineral oil such as liquid paraffin. The oily suspensions can contain a thickening agent, for example beeswax, hard paraffin or cetyl alcohol. Sweetening agents and flavoring agents can be added to provide palatable oral preparations. These compositions can be preserved by the addition of an anti-oxidant such as ascorbic acid

[0761] Dispersible powders and granules suitable for preparation of an aqueous suspension by the addition of water provide the active ingredient in admixture with a dispersing or wetting agent, suspending agent and one or more preservatives. Suitable dispersing or wetting agents or suspending agents are exemplified by those already mentioned above. Additional excipients, for example sweetening, flavoring and coloring agents, can also be present.

[0762] Pharmaceutical compositions of the invention can also be in the form of oil-in-water emulsions. The oily phase can be a vegetable oil or a mineral oil or mixtures of these. Suitable emulsifying agents can be naturally-occurring gums, for example gum acacia or gum tragacanth, naturally-occurring phosphatides, for example soy bean, lecithin, and esters or partial esters derived from fatty acids and hexitol, anhydrides, for example sorbitan monooleate, and condensation products of the said partial esters with ethylene oxide, for example polyoxyethylene sorbitan monooleate. The emulsions can also contain sweetening and flavoring agents.

[0763] Syrups and elixirs can be formulated with sweetening agents, for example glycerol, propylene glycol, sorbitol, glucose or sucrose. Such formulations can also contain a demulcent, a preservative and flavoring and coloring agents. The pharmaceutical compositions can be in the form of a sterile injectable aqueous or oleaginous suspension. This suspension can be formulated according to the known art using those suitable dispersing or wetting agents and suspending agents that have been mentioned above. The sterile injectable preparation can also be a sterile injectable solution or suspension in a non-toxic parentally acceptable diluent or solvent, for example as a solution in 1,3-butanediol. Among the acceptable vehicles and solvents that can be employed are water, Ringer's solution and isotonic sodium chloride solution. In addition, sterile, fixed oils are conventionally employed as a solvent or suspending medium. For this purpose, any bland fixed oil can be employed including synthetic mono- or diglycerides. In addition, fatty acids such as oleic acid find use in the preparation of injectables.

[0764] The nucleic acid molecules of the invention can also be administered in the form of suppositories, e.g., for rectal administration of the drug. These compositions can be prepared by mixing the drug with a suitable non-irritating excipient that is solid at ordinary temperatures but liquid at the rectal temperature and will therefore melt in the rectum to release the drug. Such materials include cocoa butter and polyethylene glycols.

[0765] Nucleic acid molecules of the invention can be administered parenterally in a sterile medium. The drug, depending on the vehicle and concentration used, can either be suspended or dissolved in the vehicle. Advantageously, adjuvants such as local anesthetics, preservatives and buffering agents can be dissolved in the vehicle.

[0766] Dosage levels of the order of from about 0.1 mg to about 140 mg per kilogram of body weight per day are useful in the treatment of the above-indicated conditions (about 0.5 mg to about 7 g per subject per day). The amount of active ingredient that can be combined with the carrier materials to produce a single dosage form varies depending upon the host treated and the particular mode of administration. Dosage unit forms generally contain between from about 1 mg to about 500 mg of an active ingredient.

[0767] It is understood that the specific dose level for any particular subject depends upon a variety of factors including the activity of the specific compound employed, the age, body weight, general health, sex, diet, time of administration, route of administration, and rate of excretion, drug combination and the severity of the particular disease undergoing therapy.

[0768] For administration to non-human animals, the composition can also be added to the animal feed or drinking water. It can be convenient to formulate the animal feed and drinking water compositions so that the animal takes in a therapeutically appropriate quantity of the composition along with its diet. It can also be convenient to present the composition as a premix for addition to the feed or drinking water.

[0769] The nucleic acid molecules of the present invention can also be administered to a subject in combination with other therapeutic compounds to increase the overall therapeutic effect. The use of multiple compounds to treat an indication can increase the beneficial effects while reducing the presence of side effects.

[0770] In one embodiment, the invention comprises compositions suitable for administering nucleic acid molecules of the invention to specific cell types. For example, the asialoglycoprotein receptor (ASGPr) (Wu and Wu, 1987, J. Biol. Chem. 262, 4429-4432) is unique to hepatocytes and binds branched galactose-terminal glycoproteins, such as asialoorosomucoid (ASOR). In another example, the folate receptor is overexpressed in many cancer cells. Binding of such glycoproteins, synthetic glycoconjugates, or folates to the receptor takes place with an affinity that strongly depends on the degree of branching of the oligosaccharide chain, for example, triatennary structures are bound with greater affinity than biatenarry or monoatennary chains (Baenziger and Fiete, 1980, Cell, 22, 611-620; Connolly et al., 1982, J. Biol. Chem., 257, 939-945). Lee and Lee, 1987, Glycoconjugate J., 4, 317-328, obtained this high specificity through the use of N-acetyl-D-galactosamine as the carbohydrate moiety, which has higher affinity for the receptor, compared to galactose. This “clustering effect” has also been described for the binding and uptake of mannosyl-terminating glycoproteins or glycoconjugates (Ponpipom et al., 1981, J. Med. Chem., 24, 1388-1395). The use of galactose, galactosamine, or folate based conjugates to transport exogenous compounds across cell membranes can provide a targeted delivery approach to, for example, the treatment of liver disease, cancers of the liver, or other cancers. The use of bioconjugates can also provide a reduction in the required dose of therapeutic compounds required for treatment. Furthermore, therapeutic bioavailability, pharmacodynamics, and pharmacokinetic parameters can be modulated through the use of nucleic acid bioconjugates of the invention. Non-limiting examples of such bioconjugates are described in Vargeese et al., U.S. Ser. No. 10/201,394, filed Aug. 13, 2001; and Matulic-Adamic et al., U.S. Ser. No. 10/151,116, filed May 17, 2002. In one embodiment, nucleic acid molecules of the invention are complexed with or covalently attached to nanoparticles, such as Hepatitis B virus S, M, or L envelope proteins (see for example Yamado et al., 2003, Nature Biotechnology, 21, 885). In one embodiment, nucleic acid molecules of the invention are delivered with specificity for human tumor cells, specifically non-apoptotic human tumor cells including for example T-cells, hepatocytes, breast carcinoma cells, ovarian carcinoma cells, melanoma cells, intestinal epithelial cells, prostate cells, testicular cells, non-small cell lung cancers, small cell lung cancers, etc.

[0771] In one embodiment, a siNA molecule of the invention is designed or formulated to specifically target endothelial cells or tumor cells. For example, various formulations and conjugates can be utilized to specifically target endothelial cells or tumor cells, including PEI-PEG-folate, PEI-PEG-RGD, PEI-PEG-biotin, PEI-PEG-cholesterol, and other conjugates known in the art that enable specific targeting to endothelial cells and/or tumor cells.

### EXAMPLES

[0772] The following are non-limiting examples showing the selection, isolation, synthesis and activity of nucleic acids of the instant invention.

### Example 1

### Tandem Synthesis of siNA Constructs

[0773] Exemplary siNA molecules of the invention are synthesized in tandem using a cleavable linker, for example, a succinyl-based linker. Tandem synthesis as described herein is followed by a one-step purification process that provides RNAi molecules in high yield. This approach is highly amenable to siNA synthesis in support of high throughput RNAi screening, and can be readily adapted to multi-column or multi-well synthesis platforms.

[0774] After completing a tandem synthesis of a siNA oligo and its complement in which the 5′-terminal dimethoxytrityl (5′-O-DMT) group remains intact (trityl on synthesis), the oligonucleotides are deprotected as described above. Following deprotection, the siNA sequence strands are allowed to spontaneously hybridize. This hybridization yields a duplex in which one strand has retained the 5′-O-DMT group while the complementary strand comprises a terminal 5′-hydroxyl. The newly formed duplex behaves as a single molecule during routine solid-phase extraction purification (Trityl-On purification) even though only one molecule has a dimethoxytrityl group. Because the strands form a stable duplex, this dimethoxytrityl group (or an equivalent group, such as other trityl groups or other hydrophobic moieties) is all that is required to purify the pair of oligos, for example, by using a C18 cartridge.

[0775] Standard phosphoramidite synthesis chemistry is used up to the point of introducing a tandem linker, such as an inverted deoxy abasic succinate or glyceryl succinate linker (see FIG. 1) or an equivalent cleavable linker. A non-limiting example of linker coupling conditions that can be used includes a hindered base such as diisopropylethylamine (DIPA) and/or DMAP in the presence of an activator reagent such as Bromotripyrrolidinophosphoniumhexaflurorophosphate (PyBrOP). After the linker is coupled, standard synthesis chemistry is utilized to complete synthesis of the second sequence leaving the terminal the 5′-O-DMT intact. Following synthesis, the resulting oligonucleotide is deprotected according to the procedures described herein and quenched with a suitable buffer, for example with 50 mM NaOAc or 1.5M NH₄H₂CO₃.

[0776] Purification of the siNA duplex can be readily accomplished using solid phase extraction, for example using a Waters C18 SepPak 1 g cartridge conditioned with 1 column volume (CV) of acetonitrile, 2 CV H₂O, and 2 CV 50 mM NaOAc. The sample is loaded and then washed with 1 CV H₂O or 50 mM NaOAc. Failure sequences are eluted with 1 CV 14% ACN (Aqueous with 50 mM NaOAc and 50 mM NaCl). The column is then washed, for example with 1 CV H₂O followed by on-column detritylation, for example by passing 1 CV of 1% aqueous trifluoroacetic acid (TFA) over the column, then adding a second CV of 1% aqueous TFA to the column and allowing to stand for approximately 10 minutes. The remaining TFA solution is removed and the column washed with H₂O followed by 1 CV 1M NaCl and additional H₂O. The siNA duplex product is then eluted, for example, using 1 CV 20% aqueous CAN.

[0777] FIG. 2 provides an example of MALDI-TOF mass spectrometry analysis of a purified siNA construct in which each peak corresponds to the calculated mass of an individual siNA strand of the siNA duplex. The same purified siNA provides three peaks when analyzed by capillary gel electrophoresis (CGE), one peak presumably corresponding to the duplex siNA, and two peaks presumably corresponding to the separate siNA sequence strands. Ion exchange HPLC analysis of the same siNA contract only shows a single peak. Testing of the purified siNA construct using a luciferase reporter assay described below demonstrated the same RNAi activity compared to siNA constructs generated from separately synthesized oligonucleotide sequence strands.

### Example 2

### Serum Stability of Chemically Modified siNA Constructs

[0778] Chemical modifications were introduced into siNA constructs to determine the stability of these constructs compared to native siNA oligonucleotides (containing two thymidine nucleotide overhangs) in human serum. An investigation of the serum stability of RNA duplexes revealed that siNA constructs consisting of all RNA nucleotides containing two thymidine nucleotide overhangs have a half-life in serum of 15 seconds, whereas chemically modified siNA constructs remained stable in serum for 1 to 3 days depending on the extent of modification (see FIG. 3). RNAi stability tests were performed by internally labeling one strand (strand 1) of siNA and duplexing with 1.5× the concentration of the complementary siNA strand (strand 2) (to insure all labeled material was in duplex form). Duplexed siNA constructs were then tested for stability by incubating at a final concentration of 2 μM siNA (strand 2 concentration) in 90% mouse or human serum for time-points of 30 sec, 1 min, 5 min, 30 min, 90 min, 4 hrs 10 min, 16 hrs 24 min, and 49 hrs. Time points were run on a 15% denaturing polyacrylamide gels and analyzed on a phosphoimager.

[0779] Internal labeling was performed via kinase reactions with polynucleotide kinase (PNK) and ³²P-γ-ATP, with addition of radiolabeled phosphate at nucleotide 13 of strand 2, counting in from the 3′ side. Ligation of the remaining 8-mer fragments with T4 RNA ligase resulted in the full length, 21-mer, strand 2. Duplexing of RNAi was done by adding appropriate concentrations of the siNA oligonucleotides and heating to 95° C. for 5 minutes followed by slow cooling to room temperature. Reactions were performed by adding 100% serum to the siNA duplexes and incubating at 37° C., then removing aliquots at desired time-points. Results of this study are summarized in FIG. 3. As shown in the FIG. 3, chemically modified siNA molecules have significantly increased serum stability compared to a siNA construct having all ribonucleotides except a 3′-terminal dithymidine (TT) modification.

### Example 3

### Identification of Potential siNA Target Sites in any RNA Sequence

[0780] The sequence of an RNA target of interest, such as a viral or human mRNA transcript, is screened for target sites, for example by using a computer folding algorithm. In a non-limiting example, the sequence of a gene or RNA gene transcript derived from a database, such as Genbank, is used to generate siNA targets having complementarity to the target. Such sequences can be obtained from a database, or can be determined experimentally as known in the art. Target sites that are known, for example, those target sites determined to be effective target sites based on studies with other nucleic acid molecules, for example ribozymes or antisense, or those targets known to be associated with a disease, condition, trait, genotype or phenotype such as those sites containing mutations or deletions, can be used to design siNA molecules targeting those sites. Various parameters can be used to determine which sites are the most suitable target sites within the target RNA sequence. These parameters include but are not limited to secondary or tertiary RNA structure, the nucleotide base composition of the target sequence, the degree of homology between various regions of the target sequence, or the relative position of the target sequence within the RNA transcript. Based on these determinations, any number of target sites within the RNA transcript can be chosen to screen siNA molecules for efficacy, for example by using in vitro RNA cleavage assays, cell culture, or animal models. In a non-limiting example, anywhere from 1 to 1000 target sites are chosen within the transcript based on the size of the siNA construct to be used. High throughput screening assays can be developed for screening siNA molecules using methods known in the art, such as with multi-well or multi-plate assays or combinatorial/siNA library screening assays to determine efficient reduction in target gene expression.

### Example 4

### Selection of siNA Molecule Target Sites in a RNA

[0781] The following non-limiting steps can be used to carry out the selection of siNAs targeting a given gene sequence or transcript.

[0782] The target sequence is parsed in silico into a list of all fragments or subsequences of a particular length, for example 23 nucleotide fragments, contained within the target sequence. This step is typically carried out using a custom Perl script, but commercial sequence analysis programs such as Oligo, MacVector, or the GCG Wisconsin Package can be employed as well.

[0783] In some instances the siNAs correspond to more than one target sequence; such would be the case for example in targeting different transcripts of the same gene, targeting different transcripts of more than one gene, or for targeting both the human gene and an animal homolog. In this case, a subsequence list of a particular length is generated for each of the targets, and then the lists are compared to find matching sequences in each list. The subsequences are then ranked according to the number of target sequences that contain the given subsequence; the goal is to find subsequences that are present in most or all of the target sequences. Alternately, the ranking can identify subsequences that are unique to a target sequence, such as a mutant target sequence. Such an approach would enable the use of siNA to target specifically the mutant sequence and not effect the expression of the normal sequence.

[0784] In some instances the siNA subsequences are absent in one or more sequences while present in the desired target sequence; such would be the case if the siNA targets a gene with a paralogous family member that is to remain untargeted. As in case 2 above, a subsequence list of a particular length is generated for each of the targets, and then the lists are compared to find sequences that are present in the target gene but are absent in the untargeted paralog.

[0785] The ranked siNA subsequences can be further analyzed and ranked according to GC content. A preference can be given to sites containing 30-70% GC, with a further preference to sites containing 40-60% GC.

[0786] The ranked siNA subsequences can be further analyzed and ranked according to self-folding and internal hairpins. Weaker internal folds are preferred; strong hairpin structures are to be avoided.

[0787] The ranked siNA subsequences can be further analyzed and ranked according to whether they have runs of GGG or CCC in the sequence. GGG (or even more Gs) in either strand can make oligonucleotide synthesis problematic and can potentially interfere with RNAi activity, so it is avoided other appropriately suitable sequences are available. CCC is searched in the target strand because that will place GGG in the antisense strand.

[0788] The ranked siNA subsequences can be further analyzed and ranked according to whether they have the dinucleotide UU (uridine dinucleotide) on the 3′-end of the sequence, and/or AA on the 5′-end of the sequence (to yield 3′ UU on the antisense sequence). These sequences allow one to design siNA molecules with terminal TT thymidine dinucleotides.

[0789] Four or five target sites are chosen from the ranked list of subsequences as described above. For example, in subsequences having 23 nucleotides, the right 21 nucleotides of each chosen 23-mer subsequence are then designed and synthesized for the upper (sense) strand of the siNA duplex, while the reverse complement of the left 21 nucleotides of each chosen 23-mer subsequence are then designed and synthesized for the lower (antisense) strand of the siNA duplex (see Tables I). If terminal TT residues are desired for the sequence (as described in paragraph 7), then the two 3′ terminal nucleotides of both the sense and antisense strands are replaced by TT prior to synthesizing the oligos.

[0790] The siNA molecules are screened in an in vitro, cell culture or animal model system to identify the most active siNA molecule or the most preferred target site within the target RNA sequence.

[0791] In an alternate approach, a pool of siNA constructs specific to a target sequence is used to screen for target sites in cells expressing target RNA, such as human HeLa cells. The general strategy used in this approach is shown in FIG. 21. A non-limiting example of such a pool is a pool comprising sequences having antisense sequences complementary to the target RNA sequence and sense sequences complementary to the antisense sequences. Cells (e.g., HeLa cells) expressing the target gene are transfected with the pool of siNA constructs and cells that demonstrate a phenotype associated with gene silencing are sorted. The pool of siNA constructs can be chemically modified as described herein and synthesized, for example, in a high throughput manner. The siNA from cells demonstrating a positive phenotypic change (e.g., decreased target mRNA levels or target protein expression), are identified, for example by positional analysis within the assay, and are used to determine the most suitable target site(s) within the target RNA sequence based upon the complementary sequence to the corresponding siNA antisense strand identified in the assay.

### Example 5

### RNAi Activity of Chemically Modified siNA Constructs

[0792] Short interfering nucleic acid (siNA) is emerging as a powerful tool for gene regulation. All-ribose siNA duplexes activate the RNAi pathway but have limited utility as therapeutic compounds due to their nuclease sensitivity and short half-life in serum, as shown in Example 2 above. To develop nuclease-resistant siNA constructs for in vivo applications, siNAs that target luciferase mRNA and contain stabilizing chemical modifications were tested for activity in HeLa cells. The sequences for the siNA oligonucleotide sequences used in this study are shown in Table I. Modifications included phosphorothioate linkages (P═S), 2′-O-methyl nucleotides, or 2′-fluoro (F) nucleotides in one or both siNA strands and various 3′-end stabilization chemistries, including 3′-glyceryl, 3′-inverted abasic, 3′-inverted Thymidine, and/or Thymidine. The RNAi activity of chemically stabilized siNA constructs was compared with the RNAi activity of control siNA constructs consisting of all ribonucleotides at every position except the 3′-terminus which comprised two thymidine nucleotide overhangs. Active siNA molecules containing stabilizing modifications such as described herein should prove useful for in vivo applications, given their enhanced nuclease-resistance.

[0793] A luciferase reporter system was utilized to test RNAi activity of chemically modified siNA constructs compared to siNA constructs consisting of all RNA nucleotides containing two thymidine nucleotide overhangs. Sense and antisense siNA strands (20 uM each) were annealed by incubation in buffer (100 mM potassium acetate, 30 mM HEPES-KOH, pH 7.4, 2 mM magnesium acetate) for 1 min. at 90° C. followed by 1 hour at 37° C. Plasmids encoding firefly luciferase (pGL2) and renilla luciferase (pRLSV40) were purchased from Promega Biotech.

[0794] HeLa S3 cells were grown at 37° C. in DMEM with 5% FBS and seeded at 15,300 cells in 100 ul media per well of a 96-well plate 24 hours prior to transfection. For transfection, 4 ul Lipofectamine 2000 (Life Technologies) was added to 96 ul OPTI-MEM, vortexed and incubated at room temperature for 5 minutes. The 100 ul diluted lipid was then added to a microtiter tube containing 5 ul pGL2 (200 ng/ul), 5 ul pRLSV40 (8 ng/ul) 6 ul siNA (25 nM or 10 nM final), and 84 ul OPTI-MEM, vortexed briefly and incubated at room temperature for 20 minutes. The transfection mix was then mixed briefly and 50 ul was added to each of three wells that contained HeLa S3 cells in 100 ul media. Cells were incubated for 20 hours after transfection and analyzed for luciferase expression using the Dual luciferase assay according to the manufacturer's instructions (Promega Biotech). The results of this study are summarized in FIGS. 4-16. The sequences of the siNA strands used in this study are shown in Table I and are referred to by Sirna/RPI # in the figures. Normalized luciferase activity is reported as the ratio of firefly luciferase activity to renilla luciferase activity in the same sample. Error bars represent standard deviation of triplicate transfections. As shown in FIGS. 4-16, the RNAi activity of chemically modified constructs is often comparable to that of unmodified control siNA constructs, which consist of all ribonucleotides at every position except the 3′-terminus which comprises two thymidine nucleotide overhangs. In some instances, the RNAi activity of the chemically modified constructs is greater than the unmodified control siNA construct consisting of all ribonucleotides.

[0795] For example, FIG. 4 shows results obtained from a screen using phosphorothioate modified siNA constructs. The Sirna/RPI 27654/27659 construct contains phosphorothioate substitutions for every pyrimidine nucleotide in both sequences, the Sirna/RPI 27657/27662 construct contains 5 terminal 3′-phosphorothioate substitutions in each strand, the Sirna/RPI 27649/27658 construct contains all phosphorothioate substitutions only in the antisense strand, whereas the Sirna/RPI 27649/27660 and Sirna/RPI 27649/27661 constructs have unmodified sense strands and varying degrees of phosphorothioate substitutions in the antisense strand. All of these constructs show significant RNAi activity when compared to a scrambled siNA control construct (27651/27652).

[0796] FIG. 5 shows results obtained from a screen using phosphorothioate (Sirna/RPI 28253/28255 and Sirna/RPI 28254/28256) and universal base substitutions (Sirna/RPI 28257/28259 and Sirna/RPI 28258/28260) compared to the same controls described above, these modifications show equivalent or better RNAi activity when compared to the unmodified control siNA construct.

[0797] FIG. 6 shows results obtained from a screen using 2′-O-methyl modified siNA constructs in which the sense strand contains either 10 (Sirna/RPI 28244/27650) or 5 (Sirna/RPI 28245/27650) 2′-O-methyl substitutions, both with comparable activity to the unmodified control siNA construct.

[0798] FIG. 7 shows results obtained from a screen using 2′-O-methyl or 2′-deoxy-2′-fluoro modified siNA constructs compared to a control construct consisting of all ribonucleotides at every position except the 3′-terminus which comprises two thymidine nucleotide overhangs.

[0799] FIG. 8 compares a siNA construct containing six phosphorothioate substitutions in each strand (Sirna/RPI 28460/28461), where 5 phosphorothioates are present at the 3′ end and a single phosphorothioate is present at the 5′ end of each strand. This motif shows very similar activity to the control siNA construct consisting of all ribonucleotides at every position except the 3′-terminus, which comprises two thymidine nucleotide overhangs.

[0800] FIG. 9 compares a siNA construct synthesized by the method of the invention described in Example 1, wherein an inverted deoxyabasic succinate linker was used to generate a siNA having a 3′-inverted deoxyabasic cap on the antisense strand of the siNA. This construct shows improved activity compared to the control siNA construct consisting of all ribonucleotides at every position except the 3′-terminus which comprises two thymidine nucleotide overhangs.

[0801] FIG. 10 shows the results of an RNAi activity screen of chemically modified siNA constructs including 3′-glyceryl modified siNA constructs compared to an all RNA control siNA construct using a luciferase reporter system. These chemically modified siNAs were compared in the luciferase assay described herein at 1 nM and 10 nM concentration using an all RNA siNA control (siGL2) having 3′-terminal dithymidine (TT) and its corresponding inverted control (Inv siGL2). The background level of luciferase expression in the HeLa cells is designated by the “cells” column. Sense and antisense strands of chemically modified siNA constructs are shown by Sirna/RPI number (sense strand/antisense strand). Sequences corresponding to these Sirna/RPI numbers are shown in Table I. As shown in the Figure, the 3′-terminal modified siNA constructs retain significant RNAi activity compared to the unmodified control siNA (siGL2) construct.

[0802] FIG. 11 shows the results of an RNAi activity screen of chemically modified siNA constructs. The screen compared various combinations of sense strand chemical modifications and antisense strand chemical modifications. These chemically modified siNAs were compared in the luciferase assay described herein at 1 nM and 10 nM concentration using an all RNA siNA control (siGL2) having 3′-terminal dithymidine (TT) and its corresponding inverted control (Inv siGL2). The background level of luciferase expression in the HeLa cells is designated by the “cells” column. Sense and antisense strands of chemically modified siNA constructs are shown by Sirna/RPI number (sense strand/antisense strand). Sequences corresponding to these Sirna/RPI numbers are shown in Table I. As shown in the figure, the chemically modified Sirna/RPI 30063/30430, Sirna/RPI 30433/30430, and Sirna/RPI 30063/30224 constructs retain significant RNAi activity compared to the unmodified control siNA construct. It should be noted that Sirna/RPI 30433/30430 is a siNA construct having no ribonucleotides which retains significant RNAi activity compared to the unmodified control siGL2 construct in vitro, therefore, this construct is expected to have both similar RNAi activity and improved stability in vivo compared to siNA constructs having ribonucleotides.

[0803] FIG. 12 shows the results of an RNAi activity screen of chemically modified siNA constructs. The screen compared various combinations of sense strand chemical modifications and antisense strand chemical modifications. These chemically modified siNAs were compared in the luciferase assay described herein at 1 nM and 10 nM concentration using an all RNA siNA control (siGL2) having 3′-terminal dithymidine (TT) and its corresponding inverted control (Inv siGL2). The background level of luciferase expression in the HeLa cells is designated by the “cells” column. Sense and antisense strands of chemically modified siNA constructs are shown by Sirna/RPI number (sense strand/antisense strand). Sequences corresponding to these Sirna/RPI numbers are shown in Table I. As shown in the figure, the chemically modified Sirna/RPI 30063/30224 and Sirna/RPI 30063/30430 constructs retain significant RNAi activity compared to the control siNA (siGL2) construct. In addition, the antisense strand alone (Sirna/RPI 30430) and an inverted control (Sirna/RPI 30227/30229), having matched chemistry to Sirna/RPI (30063/30224) were compared to the siNA duplexes described above. The antisense strand (Sirna/RPI 30430) alone provides far less inhibition compared to the siNA duplexes using this sequence.

[0804] FIG. 13 shows the results of an RNAi activity screen of chemically modified siNA constructs. The screen compared various combinations of sense strand chemical modifications and antisense strand chemical modifications. These chemically modified siNAs were compared in the luciferase assay described herein at 1 nM and 10 nM concentration using an all RNA siNA control (siGL2) having 3′-terminal dithymidine (TT) and its corresponding inverted control (Inv siGL2). The background level of luciferase expression in the HeLa cells is designated by the “cells” column. Sense and antisense strands of chemically modified siNA constructs are shown by Sirna/RPI number (sense strand/antisense strand). Sequences corresponding to these Sirna/RPI numbers are shown in Table I. In addition, an inverted control (Sirna/RPI 30226/30229, having matched chemistry to Sirna/RPI 30222/30224) was compared to the siNA duplexes described above. As shown in the figure, the chemically modified Sirna/RPI 28251/30430, Sirna/RPI 28251/30224, and Sirna/RPI 30222/30224 constructs retain significant RNAi activity compared to the control siNA construct, and the chemically modified Sirna/RPI 28251/30430 construct demonstrates improved activity compared to the control siNA (siGL2) construct.

[0805] FIG. 14 shows the results of an RNAi activity screen of chemically modified siNA constructs including various 3′-terminal modified siNA constructs compared to an all RNA control siNA construct using a luciferase reporter system. These chemically modified siNAs were compared in the luciferase assay described herein at 1 nM and 10 nM concentration using an all RNA siNA control (siGL2) having 3′-terminal dithymidine (TT) and its corresponding inverted control (Inv siGL2). The background level of luciferase expression in the HeLa cells is designated by the “cells” column. Sense and antisense strands of chemically modified siNA constructs are shown by Sirna/RPI number (sense strand/antisense strand). Sequences corresponding to these Sirna/RPI numbers are shown in Table I. As shown in the figure, the chemically modified Sirna/RPI 30222/30546, 30222/30224, 30222/30551, 30222/30557 and 30222/30558 constructs retain significant RNAi activity compared to the control siNA construct.

[0806] FIG. 15 shows the results of an RNAi activity screen of chemically modified siNA constructs. The screen compared various combinations of sense strand chemistries compared to a fixed antisense strand chemistry. These chemically modified siNAs were compared in the luciferase assay described herein at 1 nM and 10 nM concentration using an all RNA siNA control (siGL2) having 3′-terminal dithymidine (TT) and its corresponding inverted control (Inv siGL2). The background level of luciferase expression in the HeLa cells is designated by the “cells” column. Sense and antisense strands of chemically modified siNA constructs are shown by Sirna/RPI number (sense strand/antisense strand). Sequences corresponding to these Sirna/RPI numbers are shown in Table I. As shown in the figure, the chemically modified Sirna/RPI 30063/30430, 30434/30430, and 30435/30430 constructs all demonstrate greater activity compared to the control siNA (siGL2) construct.

### Example 6

### RNAi Activity Titration

[0807] A titration assay was performed to determine the lower range of siNA concentration required for RNAi activity both in a control siNA construct consisting of all RNA nucleotides containing two thymidine nucleotide overhangs and a chemically modified siNA construct comprising five phosphorothioate internucleotide linkages in both the sense and antisense strands. The assay was performed as described above, however, the siNA constructs were diluted to final concentrations between 2.5 nM and 0.025 nM. Results are shown in FIG. 16. As shown in FIG. 16, the chemically modified siNA construct shows a very similar concentration dependent RNAi activity profile to the control siNA construct when compared to an inverted siNA sequence control.

### Example 7

### siNA Design

[0808] siNA target sites were chosen by analyzing sequences of the target RNA and optionally prioritizing the target sites on the basis of folding (structure of any given sequence analyzed to determine siNA accessibility to the target), by using a library of siNA molecules as described in Example 4, or alternately by using an in vitro siNA system as described in Example 9 herein. siNA molecules were designed that could bind each target and are optionally individually analyzed by computer folding to assess whether the siNA molecule can interact with the target sequence. Varying the length of the siNA molecules can be chosen to optimize activity. Generally, a sufficient number of complementary nucleotide bases are chosen to bind to, or otherwise interact with, the target RNA, but the degree of complementarity can be modulated to accommodate siNA duplexes or varying length or base composition. By using such methodologies, siNA molecules can be designed to target sites within any known RNA sequence, for example those RNA sequences corresponding to the any gene transcript.

[0809] Chemically modified siNA constructs are designed to provide nuclease stability for systemic administration in vivo and/or improved pharmacokinetic, localization, and delivery properties while preserving the ability to mediate RNAi activity. Chemical modifications as described herein are introduced synthetically using synthetic methods described herein and those generally known in the art. The synthetic siNA constructs are then assayed for nuclease stability in serum and/or cellular/tissue extracts (e.g., liver extracts). The synthetic siNA constructs are also tested in parallel for RNAi activity using an appropriate assay, such as a luciferase reporter assay as described herein or another suitable assay that can quantity RNAi activity. Synthetic siNA constructs that possess both nuclease stability and RNAi activity can be further modified and re-evaluated in stability and activity assays. The chemical modifications of the stabilized active siNA constructs can then be applied to any siNA sequence targeting any chosen RNA and used, for example, in target screening assays to pick lead siNA compounds for therapeutic development (see for example FIG. 27).

### Example 8

### Chemical Synthesis and Purification of siNA

[0810] siNA molecules can be designed to interact with various sites in the RNA message, for example, target sequences within the RNA sequences described herein. The sequence of one strand of the siNA molecule(s) is complementary to the target site sequences described above. The siNA molecules can be chemically synthesized using methods described herein. Inactive siNA molecules that are used as control sequences can be synthesized by scrambling the sequence of the siNA molecules such that it is not complementary to the target sequence. Generally, siNA constructs can by synthesized using solid phase oligonucleotide synthesis methods as described herein (see for example Usman et al., U.S. Pat. Nos. 5,804,683; 5,831,071; 5,998,203; 6,117,657; 6,353,098; 6,362,323; 6,437,117; 6,469,158; Scaringe et al., U.S. Pat. Nos. 6,111,086; 6,008,400; 6,111,086 all incorporated by reference herein in their entirety).

[0811] In a non-limiting example, RNA oligonucleotides are synthesized in a stepwise fashion using the phosphoramidite chemistry as is known in the art. Standard phosphoramidite chemistry involves the use of nucleosides comprising any of 5′-O-dimethoxytrityl, 2′-O-tert-butyldimethylsilyl, 3′-O-2-Cyanoethyl N,N-diisopropylphos-phoroamidite groups, and exocyclic amine protecting groups (e.g., N6-benzoyl adenosine, N4 acetyl cytidine, and N2-isobutyryl guanosine). Alternately, 2′-O-Silyl Ethers can be used in conjunction with acid-labile 2′-O-orthoester protecting groups in the synthesis of RNA as described by Scaringe supra. Differing 2′ chemistries can require different protecting groups, for example 2′-deoxy-2′-amino nucleosides can utilize N-phthaloyl protection as described by Usman et al., U.S. Pat. No. 5,631,360, incorporated by reference herein in its entirety).

[0812] During solid phase synthesis, each nucleotide is added sequentially (3′- to 5′-direction) to the solid support-bound oligonucleotide. The first nucleoside at the 3′-end of the chain is covalently attached to a solid support (e.g., controlled pore glass or polystyrene) using various linkers. The nucleotide precursor, a ribonucleoside phosphoramidite, and activator are combined resulting in the coupling of the second nucleoside phosphoramidite onto the 5′-end of the first nucleoside. The support is then washed and any unreacted 5′-hydroxyl groups are capped with a capping reagent such as acetic anhydride to yield inactive 5′-acetyl moieties. The trivalent phosphorus linkage is then oxidized to a more stable phosphate linkage. At the end of the nucleotide addition cycle, the 5′-O-protecting group is cleaved under suitable conditions (e.g., acidic conditions for trityl-based groups and Fluoride for silyl-based groups). The cycle is repeated for each subsequent nucleotide.

[0813] Modification of synthesis conditions can be used to optimize coupling efficiency, for example by using differing coupling times, differing reagent/phosphoramidite concentrations, differing contact times, differing solid supports and solid support linker chemistries depending on the particular chemical composition of the siNA to be synthesized. Deprotection and purification of the siNA can be performed as is generally described in Deprotection and purification of the siNA can be performed as is generally described in Usman et al., U.S. Pat. No. 5,831,071, U.S. Pat. No. 6,353,098, U.S. Pat. No. 6,437,117, and Bellon et al, U.S. Pat. No. 6,054,576, U.S. Pat. No. 6,162,909, U.S. Pat. No. 6,303,773, or Scaringe supra, incorporated by reference herein in their entireties. Additionally, deprotection conditions can be modified to provide the best possible yield and purity of siNA constructs. For example, applicant has observed that oligonucleotides comprising 2′-deoxy-2′-fluoro nucleotides can degrade under inappropriate deprotection conditions. Such oligonucleotides are deprotected using aqueous methylamine at about 35° C. for 30 minutes. If the 2′-deoxy-2′-fluoro containing oligonucleotide also comprises ribonucleotides, after deprotection with aqueous methylamine at about 35° C. for 30 minutes, TEA-HF is added and the reaction maintained at about 65° C. for an additional 15 minutes.

### Example 9

### RNAi In Vitro Assay to Assess siNA Activity

[0814] An in vitro assay that recapitulates RNAi in a cell free system is used to evaluate siNA constructs specific to target RNA. The assay comprises the system described by Tuschl et al., 1999, Genes and Development, 13, 3191-3197 and Zamore et al., 2000, Cell, 101, 25-33 adapted for use with target RNA. A Drosophila extract derived from syncytial blastoderm is used to reconstitute RNAi activity in vitro. Target RNA is generated via in vitro transcription from an appropriate plasmid using T7 RNA polymerase or via chemical synthesis as described herein. Sense and antisense siNA strands (for example 20 uM each) are annealed by incubation in buffer (such as 100 mM potassium acetate, 30 mM HEPES-KOH, pH 7.4, 2 mM magnesium acetate) for 1 minute at 90° C. followed by 1 hour at 37° C., then diluted in lysis buffer (for example 100 mM potassium acetate, 30 mM HEPES-KOH at pH 7.4, 2 mM magnesium acetate). Annealing can be monitored by gel electrophoresis on an agarose gel in TBE buffer and stained with ethidium bromide. The Drosophila lysate is prepared using zero to two-hour-old embryos from Oregon R flies collected on yeasted molasses agar that are dechorionated and lysed. The lysate is centrifuged and the supernatant isolated. The assay comprises a reaction mixture containing 50% lysate [vol/vol], RNA (10-50 pM final concentration), and 10% [vol/vol] lysis buffer containing siNA (10 nM final concentration). The reaction mixture also contains 10 mM creatine phosphate, 10 ug.ml creatine phosphokinase, 100 um GTP, 100 uM UTP, 100 uM CTP, 500 uM ATP, 5 mM DTT, 0.1 U/uL RNasin (Promega), and 100 uM of each amino acid. The final concentration of potassium acetate is adjusted to 100 mM. The reactions are pre-assembled on ice and preincubated at 25° C. for 10 minutes before adding RNA, then incubated at 25° C. for an additional 60 minutes. Reactions are quenched with 4 volumes of 1.25× Passive Lysis Buffer (Promega). Target RNA cleavage is assayed by RT-PCR analysis or other methods known in the art and are compared to control reactions in which siNA is omitted from the reaction.

[0815] Alternately, internally-labeled target RNA for the assay is prepared by in vitro transcription in the presence of [alpha-³²P] CTP, passed over a G 50 Sephadex column by spin chromatography and used as target RNA without further purification. Optionally, target RNA is 5′-³²P-end labeled using T4 polynucleotide kinase enzyme. Assays are performed as described above and target RNA and the specific RNA cleavage products generated by RNAi are visualized on an autoradiograph of a gel. The percentage of cleavage is determined by Phosphor Imager® quantitation of bands representing intact control RNA or RNA from control reactions without siNA and the cleavage products generated by the assay.

[0816] In one embodiment, this assay is used to determine target sites the RNA target for siNA mediated RNAi cleavage, wherein a plurality of siNA constructs are screened for RNAi mediated cleavage of the RNA target, for example, by analyzing the assay reaction by electrophoresis of labeled target RNA, or by northern blotting, as well as by other methodology well known in the art.

### Example 10

### Nucleic Acid Inhibition of Target RNA In Vivo

[0817] siNA molecules targeted to the target RNA are designed and synthesized as described above. These nucleic acid molecules can be tested for cleavage activity in vivo, for example, using the following procedure.

[0818] Two formats are used to test the efficacy of siNAs targeting a particular gene transcript. First, the reagents are tested on target expressing cells (e.g., HeLa), to determine the extent of RNA and protein inhibition. siNA reagents are selected against the RNA target. RNA inhibition is measured after delivery of these reagents by a suitable transfection agent to cells. Relative amounts of target RNA are measured versus actin using real-time PCR monitoring of amplification (eg., ABI 7700 Taqman( ). A comparison is made to a mixture of oligonucleotide sequences made to unrelated targets or to a randomized siNA control with the same overall length and chemistry, but with randomly substituted nucleotides at each position. Primary and secondary lead reagents are chosen for the target and optimization performed. After an optimal transfection agent concentration is chosen, a RNA time-course of inhibition is performed with the lead siNA molecule. In addition, a cell-plating format can be used to determine RNA inhibition.

Delivery of siNA to Cells

[0819] Cells (e.g., HeLa) are seeded, for example, at 1×105 cells per well of a six-well dish in EGM-2 (BioWhittaker) the day before transfection. siNA (final concentration, for example 20 nM) and cationic lipid (e.g., final concentration 2 □g/ml) are complexed in EGM basal media (Biowhittaker) at 37° C. for 30 mins in polystyrene tubes. Following vortexing, the complexed siNA is added to each well and incubated for the times indicated. For initial optimization experiments, cells are seeded, for example, at 1×103 in 96 well plates and siNA complex added as described. Efficiency of delivery of siNA to cells is determined using a fluorescent siNA complexed with lipid. Cells in 6-well dishes are incubated with siNA for 24 hours, rinsed with PBS and fixed in 2% paraformaldehyde for 15 minutes at room temperature. Uptake of siNA is visualized using a fluorescent microscope.

Taqman and Lightcycler Quantification of mRNA

[0820] Total RNA is prepared from cells following siNA delivery, for example, using Qiagen RNA purification kits for 6-well or Rneasy extraction kits for 96-well assays. For Taqman analysis, dual-labeled probes are synthesized with the reporter dye, FAM or JOE, covalently linked at the 5′-end and the quencher dye TAMRA conjugated to the 3′-end. One-step RT-PCR amplifications are performed on, for example, an ABI PRISM 7700 Sequence Detector using 50 μl reactions consisting of 10 μl total RNA, 100 nM forward primer, 900 nM reverse primer, 100 nM probe, 1× TaqMan PCR reaction buffer (PE-Applied Biosystems), 5.5 mM MgCl2, 300 μM each dATP, dCTP, dGTP, and dTTP, 10 U RNase Inhibitor (Promega), 1.25 U AmpliTaq Gold (PE-Applied Biosystems) and 10 U M-MLV Reverse Transcriptase (Promega). The thermal cycling conditions can consist of 30 min at 48° C., 10 min at 95° C., followed by 40 cycles of 15 sec at 95° C. and 1 min at 60° C. Quantitation of mRNA levels is determined relative to standards generated from serially diluted total cellular RNA (300, 100, 33, 11 ng/rxn) and normalizing to β-actin or GAPDH mRNA in parallel TaqMan reactions. For each gene of interest an upper and lower primer and a fluorescently labeled probe are designed. Real time incorporation of SYBR Green I dye into a specific PCR product can be measured in glass capillary tubes using a lightcyler. A standard curve is generated for each primer pair using control cRNA. Values are represented as relative expression to GAPDH in each sample.

Western Blotting

[0821] Nuclear extracts can be prepared using a standard micro preparation technique (see for example Andrews and Faller, 1991, Nucleic Acids Research, 19, 2499). Protein extracts from supernatants are prepared, for example using TCA precipitation. An equal volume of 20% TCA is added to the cell supernatant, incubated on ice for 1 hour and pelleted by centrifugation for 5 minutes. Pellets are washed in acetone, dried and resuspended in water. Cellular protein extracts are run on a 10% Bis-Tris NuPage (nuclear extracts) or 4-12% Tris-Glycine (supernatant extracts) polyacrylamide gel and transferred onto nitro-cellulose membranes. Non-specific binding can be blocked by incubation, for example, with 5% non-fat milk for 1 hour followed by primary antibody for 16 hour at 4° C. Following washes, the secondary antibody is applied, for example (1:10,000 dilution) for 1 hour at room temperature and the signal detected with SuperSignal reagent (Pierce).

### Example 11

### Animal Models

[0822] Various animal models can be used to screen siNA constructs in vivo as are known in the art, for example those animal models that are used to evaluate other nucleic acid technologies such as enzymatic nucleic acid molecules (ribozymes) and/or antisense. Such animal models are used to test the efficacy of siNA molecules described herein. In a non-limiting example, siNA molecules that are designed as anti-angiogenic agents can be screened using animal models. There are several animal models available in which to test the anti-angiogenesis effect of nucleic acids of the present invention, such as siNA, directed against genes associated with angiogenesis and/or metastasis, such as VEGFR (e.g., VEGFR1, VEGFR2, and VEGFR3) genes. Typically a corneal model has been used to study angiogenesis in rat and rabbit, since recruitment of vessels can easily be followed in this normally avascular tissue (Pandey et al., 1995 Science 268: 567-569). In these models, a small Teflon or Hydron disk pretreated with an angiogenesis factor (e.g., bFGF or VEGF) is inserted into a pocket surgically created in the cornea. Angiogenesis is monitored 3 to 5 days later. siNA molecules directed against VEGFR mRNAs would be delivered in the disk as well, or dropwise to the eye over the time course of the experiment. In another eye model, hypoxia has been shown to cause both increased expression of VEGF and neovascularization in the retina (Pierce et al., 1995 Proc. Natl. Acad. Sci. USA. 92: 905-909; Shweiki et al., 1992 J. Clin. Invest. 91: 2235-2243).

[0823] Several animal models exist for screening of anti-angiogenic agents. These include corneal vessel formation following corneal injury (Burger et al., 1985 Cornea 4: 35-41; Lepri, et al, 1994 J. Ocular Pharmacol. 10: 273-280; Ormerod et al., 1990 Am. J. Pathol. 137: 1243-1252) or intracorneal growth factor implant (Grant et al., 1993 Diabetologia 36: 282-291; Pandey et al. 1995 supra; Zieche et al., 1992 Lab. Invest. 67: 711-715), vessel growth into Matrigel matrix containing growth factors (Passaniti et al., 1992 supra), female reproductive organ neovascularization following hormonal manipulation (Shweiki et al., 1993 Clin. Invest. 91: 2235-2243), several models involving inhibition of tumor growth in highly vascularized solid tumors (O'Reilly et al., 1994 Cell 79: 315-328; Senger et al., 1993 Cancer and Metas. Rev. 12: 303-324; Takahasi et al., 1994 Cancer Res. 54: 4233-4237; Kim et al., 1993 supra), and transient hypoxia-induced neovascularization in the mouse retina (Pierce et al., 1995 Proc. Natl. Acad. Sci. USA. 92: 905-909) gene

[0824] The cornea model, described in Pandey et al. supra, is the most common and well characterized anti-angiogenic agent efficacy screening model. This model involves an avascular tissue into which vessels are recruited by a stimulating agent (growth factor, thermal or alkalai burn, endotoxin). The corneal model utilizes the intrastromal corneal implantation of a Teflon pellet soaked in a VEGF-Hydron solution to recruit blood vessels toward the pellet, which can be quantitated using standard microscopic and image analysis techniques. To evaluate their anti-angiogenic efficacy, siNA molecules are applied topically to the eye or bound within Hydron on the Teflon pellet itself. This avascular cornea as well as the Matrigel model (described below) provide for low background assays. While the corneal model has been performed extensively in the rabbit, studies in the rat have also been conducted.

[0825] The mouse model (Passaniti et al., supra) is a non-tissue model which utilizes Matrigel, an extract of basement membrane (Kleinman et al., 1986) or Millipore® filter disk, which can be impregnated with growth factors and anti-angiogenic agents in a liquid form prior to injection. Upon subcutaneous administration at body temperature, the Matrigel or Millipore® filter disk forms a solid implant. VEGF embedded in the Matrigel or Millipore® filter disk is used to recruit vessels within the matrix of the Matrigel or Millipore® filter disk which can be processed histologically for endothelial cell specific vWF (factor VIII antigen) immunohistochemistry, Trichrome-Masson stain, or hemoglobin content. Like the cornea, the Matrigel or Millipore® filter disk are avascular; however, it is not tissue. In the Matrigel or Millipore® filter disk model, siNA molecules are administered within the matrix of the Matrigel or Millipore® filter disk to test their anti-angiogenic efficacy. Thus, delivery issues in this model, as with delivery of siNA molecules by Hydron-coated Teflon pellets in the rat cornea model, may be less problematic due to the homogeneous presence of the siNA within the respective matrix.

[0826] The Lewis lung carcinoma and B-16 murine melanoma models are well accepted models of primary and metastatic cancer and are used for initial screening of anti-cancer agents. These murine models are not dependent upon the use of immunodeficient mice, are relatively inexpensive, and minimize housing concerns. Both the Lewis lung and B-16 melanoma models involve subcutaneous implantation of approximately 10⁶ tumor cells from metastatically aggressive tumor cell lines (Lewis lung lines 3LL or D122, LLc-LN7; B-16-BL6 melanoma) in C57BL/6J mice. Alternatively, the Lewis lung model can be produced by the surgical implantation of tumor spheres (approximately 0.8 mm in diameter). Metastasis also may be modeled by injecting the tumor cells directly intraveneously. In the Lewis lung model, microscopic metastases can be observed approximately 14 days following implantation with quantifiable macroscopic metastatic tumors developing within 21-25 days. The B16 melanoma exhibits a similar time course with tumor neovascularization beginning 4 days following implantation. Since both primary and metastatic tumors exist in these models after 21-25 days in the same animal, multiple measurements can be taken as indices of efficacy. Primary tumor volume and growth latency as well as the number of micro- and macroscopic metastatic lung foci or number of animals exhibiting metastases can be quantitated. The percent increase in lifespan can also be measured. Thus, these models would provide suitable primary efficacy assays for screening systemically administered siNA molecules and siNA formulations.

[0827] In the Lewis lung and B-16 melanoma models, systemic pharmacotherapy with a wide variety of agents usually begins 1-7 days following tumor implantation/inoculation with either continuous or multiple administration regimens. Concurrent pharmacokinetic studies can be performed to determine whether sufficient tissue levels of siNA can be achieved for pharmacodynamic effect to be expected. Furthermore, primary tumors and secondary lung metastases can be removed and subjected to a variety of in vitro studies (i.e. target RNA reduction).

[0828] Ohno-Matsui et al., 2002, Am. J. Pathology, 160, 711-719 describe a model of severe proliferative retinopathy and retinal detachment in mice under inducible expression of vascular endothelial growth factor. In this model, expression of a VEGF transgene results in elevated levels of ocular VEGF that is associated with severe proliferative retinopathy and retinal detachment. Furthermore, Mori et al., 2001, J. Cellular Physiology, 188, 253-263, describe a model of laser induced choroidal neovascularization that can be used in conjunction with intravitreous or subretinal injection of siNA molecules of the invention to evaluate the efficacy of siNA treatment of severe proliferative retinopathy and retinal detachment.

[0829] In utilizing these models to assess siNA activity, VEGFR1, VEGFR2, and/or VEGFR3 protein levels can be measured clinically or experimentally by FACS analysis. VEGFR1, VEGFR2, and/or VEGFR3 encoded mRNA levels can be assessed by Northern analysis, RNase-protection, primer extension analysis and/or quantitative RT-PCR. siNA molecules that block VEGFR1, VEGFR2, and/or VEGFR3 protein encoding mRNAs and therefore result in decreased levels of VEGFR1, VEGFR2, and/or VEGFR3 activity by more than 20% in vitro can be identified using the techniques described herein.

### Example 12

### siNA-Mediated Inhibition of Angiogenesis In Vivo

[0830] The purpose of this study was to assess the anti-angiogenic activity of siNA targeted against VEGFR1, using the rat cornea model of VEGF induced angiogenesis discussed in Example 11 above). The siNA molecules shown in FIG. 23 have matched inverted controls which are inactive since they are not able to interact with the RNA target. The siNA molecules and VEGF were co-delivered using the filter disk method. Nitrocellulose filter disks (Millipore®) of 0.057 diameter were immersed in appropriate solutions and were surgically implanted in rat cornea as described by Pandey et al., supra.

[0831] The stimulus for angiogenesis in this study was the treatment of the filter disk with 30 μM VEGF which is implanted within the cornea's stroma. This dose yields reproducible neovascularization stemming from the pericorneal vascular plexus growing toward the disk in a dose-response study 5 days following implant. Filter disks treated only with the vehicle for VEGF show no angiogenic response. The siNA were co-adminstered with VEGF on a disk in three different siNA concentrations. One concern with the simultaneous administration is that the siNA would not be able to inhibit angiogenesis since VEGF receptors can be stimulated. However, Applicant has observed that in low VEGF doses, the neovascular response reverts to normal suggesting that the VEGF stimulus is essential for maintaining the angiogenic response. Blocking the production of VEGF receptors using simultaneous administration of anti-VEGF-R mRNA siNA could attenuate the normal neovascularization induced by the filter disk treated with VEGF.

Materials and Methods:

Test Compounds and Controls

[0832] R&D Systems VEGF, carrier free at 75 μM in 82 mM Tris-Cl, pH 6.9
[0833] siNA, 1.67 μG/μL, SITE 2340 (SIRNA/RPI 29695/29699) sense/antisense
[0834] siNA, 1.67 μG/mL, INVERTED CONTROL FOR SITE 2340 (SIRNA/RPI 29983/29984) sense/antisense
[0835] siNA 1.67 μg/μL, Site 2340 (Sirna/RPI 30196/30416) sense/antisense
   Animals
[0836] Harlan Sprague-Dawley Rats, Approximately 225-250 g
[0837] 45 males, 5 animals per group.
   Husbandry

[0838] Animals are housed in groups of two. Feed, water, temperature and humidity are determined according to Pharmacology Testing Facility performance standards (SOP's) which are in accordance with the 1996 Guide for the Care and Use of Laboratory Animals (NRC). Animals are acclimated to the facility for at least 7 days prior to experimentation. During this time, animals are observed for overall health and sentinels are bled for baseline serology.

Experimental Groups

[0839] Each solution (VEGF and siNAs) was prepared as a 1× solution for final concentrations shown in the experimental groups described in Table III.

siNA Annealing Conditions

[0840] siNA sense and antisense strands are annealed for 1 minute in H₂O at 1.67 mg/mL/strand followed by a 1 hour incubation at 37° C. producing 3.34 mg/mL of duplexed siNA. For the 20 μg/eye treatment, 6 μLs of the 3.34 mg/mL duplex is injected into the eye (see below). The 3.34 mg/mL duplex siNA can then be serially diluted for dose response assays.

Preparation of VEGF Filter Disk

[0841] For corneal implantation, 0.57 mm diameter nitrocellulose disks, prepared from 0.45 μm pore diameter nitrocellulose filter membranes (Millipore Corporation), were soaked for 30 min in 1 μL of 75 μM VEGF in 82 mM Tris HCl (pH 6.9) in covered petri dishes on ice. Filter disks soaked only with the vehicle for VEGF (83 mM Tris-Cl pH 6.9) elicit no angiogenic response.

Corneal Surgery

[0842] The rat corneal model used in this study was a modified from Koch et al. Supra and Pandey et al., supra. Briefly, corneas were irrigated with 0.5% povidone iodine solution followed by normal saline and two drops of 2% lidocaine. Under a dissecting microscope (Leica MZ-6), a stromal pocket was created and a presoaked filter disk (see above) was inserted into the pocket such that its edge was 1 mm from the corneal limbus.

Intraconjunctival Injection of Test Solutions

[0843] Immediately after disk insertion, the tip of a 40-50 μm OD injector (constructed in our laboratory) was inserted within the conjunctival tissue 1 mm away from the edge of the corneal limbus that was directly adjacent to the VEGF-soaked filter disk. Six hundred nanoliters of test solution (siNA, inverted control or sterile water vehicle) were dispensed at a rate of 1.2 μL/min using a syringe pump (Kd Scientific). The injector was then removed, serially rinsed in 70% ethanol and sterile water and immersed in sterile water between each injection. Once the test solution was injected, closure of the eyelid was maintained using microaneurism clips until the animal began to recover gross motor activity. Following treatment, animals were warmed on a heating pad at 37° C.

Quantitation of Angiogenic Response

[0844] Five days after disk implantation, animals were euthanized following administration of 0.4 mg/kg atropine and corneas were digitally imaged. The neovascular surface area (NSA, expressed in pixels) was measured postmortem from blood-filled corneal vessels using computerized morphometry (Image Pro Plus, Media Cybernetics, v2.0). The individual mean NSA was determined in triplicate from three regions of identical size in the area of maximal neovascularization between the filter disk and the limbus. The number of pixels corresponding to the blood-filled corneal vessels in these regions was summated to produce an index of NSA. A group mean NSA was then calculated. Data from each treatment group were normalized to VEGF/siNA vehicle-treated control NSA and finally expressed as percent inhibition of VEGF-induced angiogenesis.

Statistics

[0845] After determining the normality of treatment group means, group mean percent inhibition of VEGF-induced angiogenesis was subjected to a one-way analysis of variance. This was followed by two post-hoc tests for significance including Dunnett's (comparison to VEGF control) and Tukey-Kramer (all other group mean comparisons) at alpha=0.05. Statistical analyses were performed using JMP v.3.1.6 (SAS Institute).

[0846] Results of the study are graphically represented in FIGS. 23 and 76. As shown in FIG. 23, VEGFr1 site 4229 active siNA (Sirna/RPI 29695/29699) at three concentrations were effective at inhibiting angiogenesis compared to the inverted siNA control (Sirna/RPI 29983/29984) and the VEGF control. A chemically modified version of the VEGFr1 site 4229 active siNA comprising a sense strand having 2′-deoxy-2′-fluoro pyrimidines and ribo purines with 5′ and 3′ terminal inverted deoxyabasic residues and an antisense strand having 2′-deoxy-2′-fluoro pyrimidines and ribo purines with a terminal 3′-phosphorothioate internucleotide linkage (Sirna/RPI 30196/30416), showed similar inhibition. Furthermore, VEGFr1 site 349 active siNA having “Stab 9/10” chemistry (Sirna # 31270/31273) was tested for inhibition of VEGF-induced angiogenesis at three different concentrations (2.0 ug, 1.0 ug, and 0.1 μg dose response) as compared to a matched chemistry inverted control siNA construct (Sirna # 31276/31279) at each concentration and a VEGF control in which no siNA was administered. As shown in FIG. 76, the active siNA construct having “Stab 9/10” chemistry (Sirna # 31270/31273) is highly effective in inhibiting VEGF-induced angiogenesis in the rat corneal model compared to the matched chemistry inverted control siNA at concentrations from 0.1 μg to 2.0 ug. These results demonstrate that siNA molecules having different chemically modified compositions, such as the modifications described herein, are capable of significantly inhibiting angiogenesis in vivo.

### Example 13

### Inhibition of HBV Using siNA Molecules of the Invention

Transfection of HepG2 Cells with psHBV-1 and siNA

[0847] The human hepatocellular carcinoma cell line Hep G2 was grown in Dulbecco's modified Eagle media supplemented with 10% fetal calf serum, 2 mM glutamine, 0.1 mM nonessential amino acids, 1 mM sodium pyruvate, 25 mM Hepes, 100 units penicillin, and 100 μg/ml streptomycin. To generate a replication competent cDNA, prior to transfection the HBV genomic sequences are excised from the bacterial plasmid sequence contained in the psHBV-1 vector. Other methods known in the art can be used to generate a replication competent cDNA. This was done with an EcoRI and Hind III restriction digest. Following completion of the digest, a ligation was performed under dilute conditions (20 μg/ml) to favor intermolecular ligation. The total ligation mixture was then concentrated using Qiagen spin columns.

siNA Activity Screen and Dose Response Assay

[0848] Transfection of the human hepatocellular carcinoma cell line, Hep G2, with replication-competent HBV DNA results in the expression of HBV proteins and the production of virions. To test the efficacy of siNAs targeted against HBV RNA, several siNA duplexes targeting different sites within HBV pregenomic RNA were co-transfected with HBV genomic DNA once at 25 nM with lipid at 12.5 ug/ml into Hep G2 cells, and the subsequent levels of secreted HBV surface antigen (HBsAg) were analyzed by ELISA (see FIG. 24). Inverted sequence duplexes were used as negative controls. Subsequently, dose response studies were performed in which the siNA duplexes were co-transfected with HBV genomic DNA at 0.5, 5, 10 and 25 nM with lipid at 12.5 ug/ml into Hep G2 cells, and the subsequent levels of secreted HBV surface antigen (HBsAg) were analyzed by ELISA (see FIG. 25).

Analysis of HBsAg Levels Following siNA Treatment

[0849] To determine siNA activity, HbsAg levels were measured following transfection with siNA. Immulon 4 (Dynax) microtiter wells were coated overnight at 4(C with anti-HBsAg Mab (Biostride B88-95-31ad,ay) at 1 (g/ml in Carbonate Buffer (Na2CO3 15 mM, NaHCO3 35 mM, pH 9.5). The wells were then washed 4× with PBST (PBS, 0.05% Tween® 20) and blocked for 1 hr at 37(C with PBST, 1% BSA. Following washing as above, the wells were dried at 37(C for 30 min. Biotinylated goat ant-HBsAg (Accurate YVS1807) was diluted 1:1000 in PBST and incubated in the wells for 1 hr. at 37(C. The wells were washed 4× with PBST. Streptavidin/Alkaline Phosphatase Conjugate (Pierce 21324) was diluted to 250 ng/ml in PBST, and incubated in the wells for 1 hr. at 37(C. After washing as above, p-nitrophenyl phosphate substrate (Pierce 37620) was added to the wells, which were then incubated for 1 hour at 37(C. The optical density at 405 nm was then determined. Results of the HBV screen study are summarized in FIG. 24, whereas the results of a dose response assay using lead siNA constructs targeting sites 262 and 1580 of the HBV pregenomic RNA are shown in FIG. 25. As shown in FIG. 25, the siNA constructs targeting sites 262 and 1580 of HBV RNA provides significant dose response inhibition of viral replication/activity when compared to inverted siNA controls.

Comparison of Different Chemically Stabilized siNA Motifs Targeting HBV RNA Site 1580

[0850] Two different siNA stabilization chemistries were compared in a dose response HBsAg assay using inverted matched chemistry controls. The “Stab7/8” (Table IV) constructs comprise a sense strand having 2′-deoxy-2′-fluoro pyrimidine nucleotides and 2′-deoxy purine nucleotides with 5′ and 3′ terminal inverted deoxyabasic residues and an antisense strand having 2′-deoxy-2′-fluoro pyrimidine nucleotides and 2′-O-methyl purine nucleotides with a terminal 3′ phosphorothioate linkage. The “Stab7/11 (Table IV) constructs comprise a sense strand having 2′-deoxy-2′-fluoro pyrimidine nucleotides and 2′-deoxy purine nucleotides with 5′ and 3′ terminal inverted deoxyabasic residues and an antisense strand having 2′-deoxy-2′-fluoro pyrimidine nucleotides and 2′-deoxy purine nucleotides with a terminal 3′ phosphorothioate linkage (see for example Table I). As shown in FIG. 26, the chemically stabilized siNA constructs both show significant inhibition of HBV antigen in a dose dependent manner compared to matched inverted controls. A separate direct screen of Stab 7/8 constructs targeting HBV RNAin HepG2 cells that identified stabilized siNA constructs with potent activity is shown in FIG. 87.

Time Course Evaluation of Different Chemically Stabilized siNA Motifs Targeting HBV RNA Site 1580

[0851] Four different siNA constructs having different stabilization chemistries were compared to an unstabilized siRNA construct in a dose response time course HBsAg assay, the results of which are shown in FIGS. 28-31. The different constructs were compared to an unstabilized ribonucleotide control siRNA construct (Sirna/RPI #30287/30298) at different concentrations (5 nM, 10 nM, 25 nM, 50 nM, and 100 nM) over the course of nine days. Activity based on HBsAg levels was determined at day 3, day 6, and day 9. The “Stab 4/5” (Table IV) constructs comprise a sense strand (Sirna/RPI#30355) having 2′-deoxy-2′-fluoro pyrimidine nucleotides and purine ribonucleotides with 5′ and 3′ terminal inverted deoxyabasic residues and an antisense strand (Sirna/RPI#30366) having 2′-deoxy-2′-fluoro pyrimidine nucleotides and purine ribonucleotides with a terminal 3′ phosphorothioate linkage (data shown in FIG. 28). The “Stab7/8” (Table IV) constructs comprise a sense strand (Sirna/RPI#30612) having 2′-deoxy-2′-fluoro pyrimidine nucleotides and 2′-deoxy purine nucleotides with 5′ and 3′ terminal inverted deoxyabasic residues and an antisense strand (Sirna/RPI#30620) having 2′-deoxy-2′-fluoro pyrimidine nucleotides and 2′-O-methyl purine nucleotides with a terminal 3′ phosphorothioate linkage (data shown in FIG. 29). The “Stab7/11 (Table IV) constructs comprise a sense (Sirna/RPI#30612) strand having 2′-deoxy-2′-fluoro pyrimidine nucleotides and 2′-deoxy purine nucleotides with 5′ and 3′ terminal inverted deoxyabasic residues and an antisense strand (Sirna/RPI#31175) having 2′-deoxy-2′-fluoro pyrimidine nucleotides and 2′-deoxy purine nucleotides with a terminal 3′ phosphorothioate linkage (data shown in FIG. 30). The “Stab9/10 (Table IV) constructs comprise a sense (Sirna/RPI#31335) strand having ribonucleotides with 5′ and 3′ terminal inverted deoxyabasic residues and an antisense strand (Sirna/RPI#31337) having ribonucleotides with a terminal 3′ phosphorothioate linkage (data shown in FIG. 31). As shown in FIGS. 28-31, the chemically stabilized siNA constructs all show significantly greater inhibition of HBV antigen in a dose dependent manner over the time course experiment compared to the unstabilized siRNA construct.

[0852] A second study was performed using the stab 4/5 (Sirna 30355/30366), stab 7/8 (Sirna 30612/30620), and stab 7/11 (Sirna 30612/31175) siNA constructs described above to examine the duration of effect of the modified siNA constructs out to 21 days post transfection compared to an all RNA control siNA (Sirna 30287/30298). A single transfection was performed with siRNAs targeted to HBV site 1580 and the culture media was subsequently replaced every three days. Secreted HBsAg levels were monitored for at 3, 6, 9, 12, 15, 18 and 21 days post-transfection. FIG. 77 shows activity of siNAs in reduction of HBsAg levels compared to matched inverted controls at A. 3 days, B. 9 days, and C. 21 days post transfection. Also shown is the corresponding percent inhibition as function of time at siNA concentrations of D. 100 nM, E. 50 nM, and F. 25 nM.

### Example 14

### Inhibition of HCV Using siNA Molecules of the Invention

siNA Inhibition of a Chimeric HCV/Poliovirus in HeLa Cells

[0853] Inhibition of a chimeric HCV/Poliovirus was investigated using 21 nucleotide siNA duplexes in HeLa cells. Seven siNA constructs were designed that target three regions in the highly conserved 5′ untranslated region (UTR) of HCV RNA. The siNAs were screened in two cell culture systems dependent upon the 5′-UTR of HCV; one requires translation of an HCV/luciferase gene, while the other involves replication of a chimeric HCV/poliovirus (PV) (see Blatt et al., U.S. Ser. No. 09/740,332, filed Dec. 18, 2000, incorporated by reference herein). Two siNAs (29579/29586; 29578/29585) targeting the same region (shifted by one nucleotide) are active in both systems (see FIG. 32) as compared with inverse control siNA (29593/29600). For example, a >85% reduction in HCVPV replication was observed in siNA-treated cells compared to an inverse siNA control (FIG. 32) with an IC50=˜2.5 nM (FIG. 33). To develop nuclease-resistant siNA for in vivo applications, siNAs can be modified to contain stabilizing chemical modifications. Such modifications include phosphorothioate linkages (P═S), 2′-O-methyl nucleotides, 2′-fluoro (F) nucleotides, 2′-deoxy nucleotides, universal base nucleotides, 5′ and/or 3′ end modifications and a variety of other nucleotide and non-nucleotide modifications, in one or both siNA strands. Several of these constructs were tested in the HCV/poliovirus chimera system, demonstrating significant reduction in viral replication (FIGS. 34-37). siNA constructs shown in FIGS. 34-37 are referred to by Sirna/RPI#s that are cross referenced to Table III, which shows the sequence and chemical modifications of the constructs. siNA activity is compared to relevant controls (untreated cells, scrambled/inactive control sequences, or transfection controls). As shown in the Figures, siNA constructs of the invention provide potent inhibition of HCV RNA in the HCV/poliovirus chimera system. As such, siNA constructs, including chemically modified, nuclease resistant siNA molecules, represent an important class of therapeutic agents for treating chronic HCV infection.

siNA Inhibition of a HCV RNA Expression in a HCV Replicon System

[0854] In addition, a HCV replicon system was used to test the efficacy of siNAs targeting HCV RNA. The reagents are tested in cell culture using Huh7 cells (see for example Randall et al., 2003, PNAS USA, 100, 235-240) to determine the extent of RNA and protein inhibition. siNA were selected against the HCV target as described herein. RNA inhibition was measured after delivery of these reagents by a suitable transfection agent to Huh7 cells. Relative amounts of target RNA are measured versus actin using real-time PCR monitoring of amplification (eg., ABI 7700 Taqman( ). A comparison is made to a mixture of oligonucleotide sequences, designed to target unrelated targets or to a randomized siNA control with the same overall length and chemistry, but with randomly substituted nucleotides at each position. Primary and secondary lead reagents were chosen for the target and optimization performed. After an optimal transfection agent concentration is chosen, a RNA time-course of inhibition is performed with the lead siNA molecule. In addition, a cell-plating format can be used to determine RNA inhibition. A non-limiting example of a multiple target screen to assay siNA mediated inhibition of HCV RNA is shown in FIG. 38. siNA reagents (Table I) were transfected at 25 nM into Huh7 cells and HCV RNA quantitated compared to untreated cells (“cells” column in the figure) and cells transfected with lipofectamine (“LFA2K” column in the figure). As shown in the Figure, several siNA constructs show significant inhibition of HCV RNA expression in the Huh7 replicon system. Chemically modified siNA constructs were then screened as described above, with a non-limiting example of a Stab 7/8 (see Table IV) chemistry siNA construct screen shown in FIG. 40. A follow up dose response study using chemically modified siNA constructs (Stab 4/5, see Table IV) at concentrations of 5 nM, 10 nM, 25 nM and 100 nM compared to matched chemistry inverted controls is shown in FIG. 39, whereas a dose response study for Stab 7/8 constructs at concentrations of 5 nM, 10 nM, 25 nM, 50 nM and 100 nM compared to matched chemistry inverted controls is shown in FIG. 41. A separate direct screen of Stab 7/8 constructs targeting HCV RNA that identified stabilized siNA constructs with potent activity is shown in FIG. 86.

### Example 15

### Target Discovery in Mammalian Cells Using siNA Molecules

[0855] In a non-limiting example, compositions and methods of the invention are used to discover genes involved in a process of interest within mammalian cells, such as cell growth, proliferation, apoptosis, morphology, angiogenesis, differentiation, migration, viral multiplication, drug resistance, signal transduction, cell cycle regulation, or temperature sensitivity or other process. First, a randomized siNA library is generated. These constructs are inserted into a vector capable of expressing a siNA from the library inside mammalian cells. Alternately, a pool of synthetic siNA molecules is generated.

Reporter System

[0856] In order to discover genes playing a role in the expression of certain proteins, such as proteins involved in a cellular process described herein, a readily assayable reporter system is constructed in which a reporter molecule is co-expressed when a particular protein of interest is expressed. The reporter system consists of a plasmid construct bearing a gene coding for a reporter gene, such as Green Fluorescent Protein (GFP) or other reporter proteins known and readily available in the art. The promoter region of the GFP gene is replaced by a portion of a promoter for the protein of interest sufficient to direct efficient transcription of the GFP gene. The plasmid can also contain a drug resistance gene, such as neomycin resistance, in order to select cells containing the plasmid.

Host Cell Lines for Target Discovery

[0857] A cell line is selected as host for target discovery. The cell line is preferably known to express the protein of interest, such that upstream genes controlling the expression of the protein can be identified when modulated by a siNA construct expressed therein. The cells preferably retain protein expression characteristics in culture. The reporter plasmid is transfected into cells, for example, using a cationic lipid formulation. Following transfection, the cells are subjected to limiting dilution cloning, for example, under selection by 600 μg/mL Geneticin. Cells retaining the plasmid survive the Geneticin treatment and form colonies derived from single surviving cells. The resulting clonal cell lines are screened by flow cytometry for the capacity to upregulate GFP production. Treating the cells with, for example, sterilized M9 bacterial medium in which Pseudomonas aeruginosa had been cultured (Pseudomonas conditioned medium, PCM) is used to induce the promoter. The PCM is supplemented with phorbol myristate acetate (PMA). A clonal cell line highly responsive to promoter induction is selected as the reporter line for subsequent studies.

siNA Library Construction

[0858] A siNA library was constructed with oligonucleotides containing hairpin siNA constructs having randomized antisense regions and self complementary sense regions. The library is generated synthesizing siNA constructs having randomized sequence. Alternately, the siNA libraries are constructed as described in Usman et al., U.S. Ser. No. 60/402,996 (incorporated by reference herein) Oligo sequence 5′ and 3′ of the siNA contains restriction endonuclease cleavage sites for cloning. The 3′ trailing sequence forms a stem-loop for priming DNA polymerase extension to form a hairpin structure. The hairpin DNA construct is melted at 90° C. allowing DNA polymerase to generate a dsDNA construct. The double-stranded siNA library is cloned into, for example, a U6+27 transcription unit located in the 5′ LTR region of a retroviral vector containing the human nerve growth factor receptor (hNGFr) reporter gene. Positioning the U6+27/siNA transcription unit in the 5′ LTR results in a duplication of the transcription unit when the vector integrates into the host cell genome. As a result, the siNA is transcribed by RNA polymerase III from U6+27 and by RNA polymerase II activity directed by the 5′ LTR. The siNA library is packaged into retroviral particles that are used to infect and transduce clonal cells selected above. Assays of the hNGFr reporter are used to indicate the percentage of cells that incorporated the siNA construct. By randomized region is meant a region of completely random sequence and/or partially random sequence. By completely random sequence is meant a sequence wherein theoretically there is equal representation of A, T, G and C nucleotides or modified derivatives thereof, at each position in the sequence. By partially random sequence is meant a sequence wherein there is an unequal representation of A, T, G and C nucleotides or modified derivatives thereof, at each position in the sequence. A partially random sequence can therefore have one or more positions of complete randomness and one or more positions with defined nucleotides.

Enriching for Non-Responders to Induction

[0859] Sorting of siNA library-containing cells is performed to enrich for cells that produce less reporter GFP after treatment with the promoter inducers PCM and PMA. Lower GFP production cancan be due to RNAi activity against genes involved in the activation of the mucin promoter. Alternatively, siNA can directly target the mucin/GFP transcript resulting in reduced GFP expression.

[0860] Cells are seeded at a certain density, such as 1×10⁶ per 150 cm² style cell culture flasks and grown in the appropriate cell culture medium with fetal bovine serum. After 72 hours, the cell culture medium is replaced with serum-free medium. After 24 hours of serum deprivation, the cells are treated with serum-containing medium supplemented with PCM (to 40%) and PMA (to 50 nM) to induced GFP production. After 20 to 22 hours, cells are monitored for GFP level on, for example, a FACStar Plus cell sorter. Sorting is performed if ≧90% of siNA library cells from an unsorted control sample were induced to produce GFP above background levels. Two cell fractions are collected in each round of sorting. Following the appropriate round of sorting, the M1 fraction is selected to generate a database of siNA molecules present in the sorted cells.

Recovery of siNA Sequence from Sorted Cells

[0861] Genomic DNA is obtained from sorted siNA library cells by standard methods. Nested polymerase chain reaction (PCR) primers that hybridized to the retroviral vector 5′ and 3′ of the siNA are used to recover and amplify the siNA sequences from the particular clone of library cell DNA. The PCR product is ligated into a bacterial cloning vector. The recovered siNA library in plasmid form can be used to generate a database of siNA sequences. For example, the library is cloned into E. coli. DNA is prepared by plasmid isolation from bacterial colonies or by direct colony PCR and siNA sequence is determined. A second method can use the siNA library to transfect cloned cells. Clonal lines of stably transfected cells are established and induced with, for example, PCM and PMA. Those lines which fail to respond to GFP induction are probed by PCR for single siNA integration events. The unique siNA sequences obtained by both methods are added to a Target Sequence Tag (TST) database.

Bioinformatics

[0862] The antisense region sequences of the isolated siNA constructs are compared to public and private gene data banks. Gene matches are compiled according to perfect and imperfect matches. Potential gene targets are categorized by the number of different siNA sequences matching each gene. Genes with more than one perfect siNA match are selected for Target Validation studies.

Validation of the Target Gene

[0863] To validate a target as a regulator of protein expression, siNA reagents are designed to the target gene cDNA sequence from Genbank. The siNA reagents are complexed with a cationic lipid formulation prior to administration to cloned cells at appropriate concentrations (e.g., 5-50 nM or less). Cells are treated with siNA reagents, for example from 72 to 96 hours. Before the termination of siNA treatment, PCM (to 40%) and PMA (to 50 nM), for example, are added to induce the promoter. After twenty hours of induction the cells are harvested and assayed for phenotypic and molecular parameters. Reduced GFP expression in siNA treated cells (measured by flow cytometry) is taken as evidence for validation of the target gene. Knockdown of target RNA in siNA treated cells can correlate with reduced endogenous RNA and reduced GFP RNA to complete validation of the target.

### Example 16

### Screening siNA Constructs for Improved Pharmacokinetics

[0864] In a non-limiting example, siNA constructs are screened in vivo for improved pharmacokinetic properties compared to all RNA or unmodified siNA constructs. Chemical modifications are introduced into the siNA construct based on educated design parameters (e.g., introducing 2′-modifications, base modifications, backbone modifications, terminal cap modifications, or covalently attached conjugates etc). The modified construct in tested in an appropriate system (e.g human serum for nuclease resistance, shown, or an animal model for PK/delivery parameters). In parallel, the siNA construct is tested for RNAi activity, for example in a cell culture system such as a luciferase reporter assay). Lead siNA constructs are then identified which possess a particular characteristic while maintaining RNAi activity, and can be further modified and assayed once again. This same approach can be used to identify siNA-conjugate molecules with improved pharmacokinetic profiles, delivery, localized delivery, cellular uptake, and RNAi activity.

### Example 17

### Indications

[0865] The siNA molecules of the invention can be used to treat a variety of diseases and conditions through modulation of gene expression. Using the methods described herein, chemically modified siNA molecules can be designed to modulate the expression any number of target genes, including but not limited to genes associated with cancer, metabolic diseases, infectious diseases such as viral, bacterial or fungal infections, neurologic diseases, musculoskeletal diseases, diseases of the immune system, diseases associated with signaling pathways and cellular messengers, and diseases associated with transport systems including molecular pumps and channels.

[0866] Non-limiting examples of various viral genes that can be targeted using siNA molecules of the invention include Hepatitis C Virus (HCV, for example Genbank Accession Nos: D11168, D50483.1, L38318 and S82227), Hepatitis B Virus (HBV, for example GenBank Accession No. AF100308.1), Human Immunodeficiency Virus type 1 (HIV-1, for example GenBank Accession No. U51188), Human Immunodeficiency Virus type 2 (HIV-2, for example GenBank Accession No. X60667), West Nile Virus (WNV for example GenBank accession No. NC_{—}001563), cytomegalovirus (CMV for example GenBank Accession No. NC_{—}001347), respiratory syncytial virus (RSV for example GenBank Accession No. NC_{—}001781), influenza virus (for example GenBank Accession No. AF037412, rhinovirus (for example, GenBank accession numbers: D00239, X02316, X01087, L24917, M16248, K02121, X01087), papillomavirus (for example GenBank Accession No. NC_{—}001353), Herpes Simplex Virus (HSV for example GenBank Accession No. NC_{—}001345), and other viruses such as HTLV (for example GenBank Accession No. AJ430458). Due to the high sequence variability of many viral genomes, selection of siNA molecules for broad therapeutic applications would likely involve the conserved regions of the viral genome. Nonlimiting examples of conserved regions of the viral genomes include but are not limited to 5′-Non Coding Regions (NCR), 3′-Non Coding Regions (NCR) LTR regions and/or internal ribosome entry sites (IRES). siNA molecules designed against conserved regions of various viral genomes will enable efficient inhibition of viral replication in diverse patient populations and may ensure the effectiveness of the siNA molecules against viral quasi species which evolve due to mutations in the non-conserved regions of the viral genome.

[0867] Non-limiting examples of human genes that can be targeted using siNA molecules of the invention using methods described herein include any human RNA sequence, for example those commonly referred to by Genbank Accession Number. These RNA sequences can be used to design siNA molecules that inhibit gene expression and therefore abrogate diseases, conditions, or infections associated with expression of those genes. Such non-limiting examples of human genes that can be targeted using siNA molecules of the invention include VEGF (for example GenBank Accession No. NM_{—}003376.3), VEGFr (VEGFR1 for example GenBank Accession No. XM_{—}067723, VEGFR2 for example GenBank Accession No. AF063658), HER1, HER2, HER3, and HER4 (for example Genbank Accession Nos: NM_{—}005228, NM_{—}004448, NM_{—}001982, and NM_{—}005235 respectively), telomerase (TERT, for example GenBank Accession No. NM_{—}003219), telomerase RNA (for example GenBank Accession No. U86046), NFkappaB, Rel-A (for example GenBank Accession No. NM_{—}005228), NOGO (for example GenBank Accession No. AB020693), NOGOr (for example GenBank Accession No. XM_{—}015620), RAS (for example GenBank Accession No. NM_{—}004283), RAF (for example GenBank Accession No. XM_{—}033884), CD20 (for example GenBank Accession No. X07203), METAP2 (for example GenBank Accession No. NM 003219), CLCA1 (for example GenBank Accession No. NM_{—}001285), phospholamban (for example GenBank Accession No. NM_{—}002667), PTP1B (for example GenBank Accession No. M31724), PCNA (for example GenBank Accession No. NM_{—}002592.1), PKC-alpha (for example GenBank Accession No. NM_{—}002737) and others. The genes described herein are provided as non-limiting examples of genes that can be targeted using siNA molecules of the invention. Additional examples of such genes are described by accession number in Beigelman et al., U.S. Ser. No. 60/363,124, filed Mar. 11, 2002 and incorporated by reference herein in its entirety.

[0868] The siNA molecule of the invention can also be used in a variety of agricultural applications involving modulation of endogenous or exogenous gene expression in plants using siNA, including use as insecticidal, antiviral and anti-fungal agents or modulate plant traits such as oil and starch profiles and stress resistance.

### Example 18

### Diagnostic Uses

[0869] The siNA molecules of the invention can be used in a variety of diagnostic applications, such as in the identification of molecular targets (e.g., RNA) in a variety of applications, for example, in clinical, industrial, environmental, agricultural and/or research settings. Such diagnostic use of siNA molecules involves utilizing reconstituted RNAi systems, for example, using cellular lysates or partially purified cellular lysates. siNA molecules of this invention can be used as diagnostic tools to examine genetic drift and mutations within diseased cells or to detect the presence of endogenous or exogenous, for example viral, RNA in a cell. The close relationship between siNA activity and the structure of the target RNA allows the detection of mutations in any region of the molecule, which alters the base-pairing and three-dimensional structure of the target RNA. By using multiple siNA molecules described in this invention, one can map nucleotide changes, which are important to RNA structure and function in vitro, as well as in cells and tissues. Cleavage of target RNAs with siNA molecules can be used to inhibit gene expression and define the role of specified gene products in the progression of disease or infection. In this manner, other genetic targets can be defined as important mediators of the disease. These experiments will lead to better treatment of the disease progression by affording the possibility of combination therapies (e.g., multiple siNA molecules targeted to different genes, siNA molecules coupled with known small molecule inhibitors, or intermittent treatment with combinations siNA molecules and/or other chemical or biological molecules). Other in vitro uses of siNA molecules of this invention are well known in the art, and include detection of the presence of mRNAs associated with a disease, infection, or related condition. Such RNA is detected by determining the presence of a cleavage product after treatment with a siNA using standard methodologies, for example, fluorescence resonance emission transfer (FRET).

[0870] In a specific example, siNA molecules that cleave only wild-type or mutant forms of the target RNA are used for the assay. The first siNA molecules (i.e., those that cleave only wild-type forms of target RNA) are used to identify wild-type RNA present in the sample and the second siNA molecules (i.e., those that cleave only mutant forms of target RNA) are used to identify mutant RNA in the sample. As reaction controls, synthetic substrates of both wild-type and mutant RNA are cleaved by both siNA molecules to demonstrate the relative siNA efficiencies in the reactions and the absence of cleavage of the “non-targeted” RNA species. The cleavage products from the synthetic substrates also serve to generate size markers for the analysis of wild-type and mutant RNAs in the sample population. Thus, each analysis requires two siNA molecules, two substrates and one unknown sample, which is combined into six reactions. The presence of cleavage products is determined using an RNase protection assay so that full-length and cleavage fragments of each RNA can be analyzed in one lane of a polyacrylamide gel. It is not absolutely required to quantify the results to gain insight into the expression of mutant RNAs and putative risk of the desired phenotypic changes in target cells. The expression of mRNA whose protein product is implicated in the development of the phenotype (i.e., disease related or infection related) is adequate to establish risk. If probes of comparable specific activity are used for both transcripts, then a qualitative comparison of RNA levels is adequate and decreases the cost of the initial diagnosis. Higher mutant form to wild-type ratios are correlated with higher risk whether RNA levels are compared qualitatively or quantitatively.

### Example 19

### Synthesis of siNA Conjugates

[0871] The introduction of conjugate moieties to siNA molecules of the invention is accomplished either during solid phase synthesis using phosphoramidite chemistry described above, or post-synthetically using, for example, N-hydroxysuccinimide (NHS) ester coupling to an amino linker present in the siNA. Typically, a conjugate introduced during solid phase synthesis will be added to the 5′-end of a nucleic acid sequence as the final coupling reaction in the synthesis cycle using the phosphoramidite approach. Coupling conditions can be optimized for high yield coupling, for example by modification of coupling times and reagent concentrations to effectuate efficient coupling. As such, the 5′-end of the sense strand of a siNA molecule is readily conjugated with a conjugate moiety having a reactive phosphorus group available for coupling (e.g., a compound having Formulae 1, 5, 8, 55, 56, 57, 60, 86, 92, 104, 110, 113, 115, 116, 117, 118, 120, or 122) using the phosphoramidite approach, providing a 5′-terminal conjugate (see for example FIG. 65).

[0872] Conjugate precursors having a reactive phosphorus group and a protected hydroxyl group can be used to incorporate a conjugate moiety anywhere in the siNA sequence, such as in the loop portion of a single stranded hairpin siNA construct (see for example FIG. 66). For example, using the phosphoramidite approach, a conjugate moiety comprising a phosphoramidite and protected hydroxyl (e.g., a compound having Formulae 86, 92, 104, 113, 115, 116, 117, 118, 120, or 122 herein) is first coupled at the desired position within the siNA sequence using solid phase synthesis phosphoramidite coupling. Second, removal of the protecting group (e.g., dimethoxytrityl) allows coupling of additional nucleotides to the siNA sequence. This approach allows the conjugate moiety to be positioned anywhere within the siNA molecule.

[0873] Conjugate derivatives can also be introduced to a siNA molecule post synthetically. Post synthetic conjugation allows a conjugate moiety to be introduced at any position within the siNA molecule where an appropriate functional group is present (e.g., a C5 alkylamine linker present on a nucleotide base or a 2′-alkylamine linker present on a nucleotide sugar can provide a point of attachment for an NHS-conjugate moiety). Generally, a reactive chemical group present in the siNA molecule is unmasked following synthesis, thus allowing post-synthetic coupling of the conjugate to occur. In a non-limiting example, an protected amino linker containing nucleotide (e.g., TFA protected C5 propylamino thymidine) is introduced at a desired position of the siNA during solid phase synthesis. Following cleavage and deprotection of the siNA, the free amine is made available for NHS ester coupling of the conjugate at the desired position within the siNA sequence, such as at the 3′-end of the sense and/or antisense strands, the 3′ and/or 5′-end of the sense strand, or within the siNA sequence, such as in the loop portion of a single stranded hairpin siNA sequence.

[0874] A conjugate moiety can be introduced at different locations within a siNA molecule using both solid phase synthesis and post-synthetic coupling approaches. For example, solid phase synthesis can be used to introduce a conjugate moiety at the 5′-end of the siNA (e.g., sense strand) and post-synthetic coupling can be used to introduce a conjugate moiety at the 3′-end of the siNA (e.g., sense strand and/or antisense strand). As such, a siNA sense strand having 3′ and 5′ end conjugates can be synthesized (see for example FIG. 65). Conjugate moieties can also be introduced in other combinations, such as at the 5′-end, 3′-end and/or loop portions of a siNA molecule (see for example FIG. 66).

### Example 20

### Pharmacokinetics of siNA Conjugates (FIG. 67)

[0875] Three nuclease resistant siNA molecule targeting site 1580 of hepatitis B virus (HBV) RNA were designed using Stab 7/8 chemistry. (see Table IV) and a 5′-terminal conjugate moiety.

[0876] One siNA conjugate comprises a branched cholesterol conjugate linked to the sense strand of the siNA. The “cholesterol” siNA conjugate molecule has the structure shown below:

[chemical structure]

[0877] where T stands for thymidine, B stands for inverted deoxyabasic, G stands for 2′-deoxy guanosine, A stands for 2′-deoxy adenosine, G stands for 2′-O-methyl guanosine, A stands for 2′-O-methyl adenosine, u stands for 2′-fluoro uridine, c stands for 2′-fluoro cytidine, a stands for adenosine, and s stands for phosphorothioate linkage.

[0878] Another siNA conjugate comprises a branched phospholipid conjugate linked to the sense strand of the siNA. The “phospholipid” siNA conjugate molecule has the structure shown below:

[chemical structure]

[0879] where T stands for thymidine, B stands for inverted deoxyabasic, G stands for 2′-deoxy guanosine, A stands for 2′-deoxy adenosine, G stands for 2′-O-methyl guanosine, A stands for 2′-O-methyl adenosine, u stands for 2′-fluoro uridine, c stands for 2′-fluoro cytidine, a stands for adenosine, and s stands for phosphorothioate linkage.

[0880] Another siNA conjugate comprises a polyethylene glycol (PEG) conjugate linked to the sense strand of the siNA. The “PEG” siNA conjugate molecule has the structure shown below:

[chemical structure]

[0881] where T stands for thymidine, B stands for inverted deoxyabasic, G stands for 2′-deoxy guanosine, A stands for 2′-deoxy adenosine, G stands for 2′-O-methyl guanosine; A stands for 2′-O-methyl adenosine, u stands for 2′-fluoro uridine, c stands for 2′-fluoro cytidine, a stands for adenosine, and s stands for phosphorothioate linkage.

[0882] The Cholesterol, Phospholipid, and PEG conjugates were evaluated for pharmakokinetic properties in mice compared to a non-conjugated siNA construct having matched chemistry and sequence. This study was conducted in female CD-1 mice approximately 26 g (6-7 weeks of age). Animals were housed in groups of 3. Food and water were provided ad libitum. Temperature and humidity were according to Pharmacology Testing Facility performance standards (SOP's) which are in accordance with the 1996 Guide for the Care and Use of Laboratory Animals (NRC). Animals were acclimated to the facility for at least 3 days prior to experimentation.

[0883] Absorbance at 260 nm was used to determine the actual concentration of the stock solution of pre-annealed HBV siNA. An appropriate amount of HBV siNA was diluted in sterile veterinary grade normal saline (0.9%) based on the average body weight of the mice. A small amount of the antisense (Stab 7) strand was internally labeled with gamma 32P-ATP. The 32P-labeled stock was combined with excess sense strand (Stab 8) and annealed. Annealing was confirmed prior to combination with unlabled drug. Each mouse received a subcutaneous bolus of 30 mg/kg (based on duplex) and approximately 10 million cpm (specific activity of approximately 15 cpm/ng).

[0884] Three animals per timepoint (1, 4, 8, 24, 72, 96 h) were euthanized by CO2 inhalation followed immediately by exsanguination. Blood was sampled from the heart and collected in heparinized tubes. After exsanguination, animals were perfused with 10-15 mL of sterile veterinary grade saline via the heart. Samples of liver were then collected and frozen.

[0885] Tissue samples were homogenized in a digestion buffer prior to compound quantitation. Quantitation of intact compound was determined by scintillation counting followed by PAGE and phosphorimage analysis. Results are shown in FIG. 43. As shown in the figure, the conjugated siNA constructs shown vastly improved liver PK compared to the unconjugated siNA construct.

### Example 21

### Cell Culture of siNA Conjugates (FIG. 68)

[0886] The Cholesterol conjugates and Phospholipid conjugated siNA constructs described in Example 20 above were evaluated for cell culture efficacy in a HBV cell culture system.

Transfection of HepG2 Cells with psHBV-1 and siNA

[0887] The human hepatocellular carcinoma cell line Hep G2 was grown in Dulbecco's modified Eagle media supplemented with 10% fetal calf serum, 2 mM glutamine, 0.1 mM nonessential amino acids, 1 mM sodium pyruvate, 25 mM Hepes, 100 units penicillin, and 100 μg/ml streptomycin. To generate a replication competent cDNA, prior to transfection the HBV genomic sequences are excised from the bacterial plasmid sequence contained in the psHBV-1 vector. Other methods known in the art can be used to generate a replication competent cDNA. This was done with an EcoRI and Hind III restriction digest. Following completion of the digest, a ligation was performed under dilute conditions (20 μg/ml) to favor intermolecular ligation. The total ligation mixture was then concentrated using Qiagen spin columns.

siNA Activity Screen and Dose Response Assay

[0888] Transfection of the human hepatocellular carcinoma cell line, Hep G2, with replication-competent HBV DNA results in the expression of HBV proteins and the production of virions. To test the efficacy of siNA conjugates targeted against HBV RNA, the Cholesterol siNA conjugate and Phospholipid siNA conjugate described in Example 12 were compared to a non-conjugated control siNA (see FIG. 68). An inverted sequence duplex was used as a negative control for the unconjugated siNA. Dose response studies were performed in which HBV genomic DNA was transfected with HBV genomic DNA with lipid at 12.5 ug/ml into Hep G2 cells. 24 hours after transfection with HBV DNA, cell culture media was removed and siNA duplexes were added to cells without lipid at 10 uM, 5, uM, 2.5 uM, 1 uM, and 100 nm and the subsequent levels of secreted HBV surface antigen (HBsAg) were analyzed by ELISA 72 hours post treatment (see FIG. 44). To determine siNA activity, HbsAg levels were measured following transfection with siNA. Immulon 4 (Dynax) microtiter wells were coated overnight at 4° C. with anti-HBsAg Mab (Biostride B88-95-31ad,ay) at 1 μg/ml in Carbonate Buffer (Na2CO3 15 mM, NaHCO3 35 mM, pH 9.5). The wells were then washed 4× with PBST (PBS, 0.05% Tween® 20) and blocked for 1 hr at 37° C. with PBST, 1% BSA. Following washing as above, the wells were dried at 37° C. for 30 min. Biotinylated goat ant-HBsAg (Accurate YVS1807) was diluted 1:1000 in PBST and incubated in the wells for 1 hr. at 37° C. The wells were washed 4× with PBST. Streptavidin/Alkaline Phosphatase Conjugate (Pierce 21324) was diluted to 250 ng/ml in PBST, and incubated in the wells for 1 hr. at 37° C. After washing as above, p-nitrophenyl phosphate substrate (Pierce 37620) was added to the wells, which were then incubated for 1 hour at 37° C. The optical density at 405 nm was then determined. As shown in FIG. 68, the phospholipid and cholesterol conjugates demonstrate marked dose dependent inhibition of HBsAg expression compared to the unconjugated siNA construct when delivered to cells without any transfection agent (lipid).

### Example 22

### Ex Vivo Stability of siNA Constructs

[0889] Chemically modified siNA constructs were designed and synthesized in order to improve resistance to nucleases while maintaining silencing in cell culture systems. Modified strands, designated Stab 4, Stab 5, Stab 7, Stab 8, and Stab 11 (Table IV), were tested in three sets of duplexes that demonstrated a range of stability and activity. These duplexes contained differentially modified sense and antisense strands. All modified sense strands contain terminal 5′ and 3′ inverted abasic caps, while antisense strands possess a 3′ terminal phosphorothioate linkage. The results characterize the impact of chemical modifications on nuclease resistance in ex vivo models of the environments sampled by drugs.

[0890] Active siNAs were assessed for their resistance to degradation in serum and liver extracts. Stability in blood will be a requirement for a systemically administered siNA, and an anti-HBV or anti-HCV siNA would require stability and activity in the hepatic intracellular environment. Liver extracts potentially provide an extreme nuclease model where many catabolic enzymes are present. Both mouse and human systems were assessed.

[0891] Individual strands of siNA duplexes were internally labeled with 32P and incubated as single strands or as duplex siRNAs in human or mouse serum and liver extracts. Representative data is shown in Table VI. Throughout the course of the experiments, constant levels of ribonuclease activity were verified. The extent and pattern of all-RNA siNA degradation (3 minute time point) did not change following preincubation of serum or liver extract at 37° C. for up to 24 hours.

[0892] The biological activity of siRNAs containing all-ribose residues has been well established. The extreme instability (t½=0.017 hours) of these compounds in serum underscores the need for chemical modification for use in systemic therapeutic applications. The Stab 4/5 duplex modifications provide significant stability in human and mouse serum (t½'s=10-408 hours) and human liver extract (t½'s=28-43 hours). In human serum the Stab 4 strand chemistry in the context of the Stab 4/5 duplex, possesses greater stability than the Stab 5 strand chemistry (t½=408 vs. 39 hours). This result highlights the impact terminal modifications have on stability. A fully-modified Stab 7/11 construct (no ribonucleotides present) was generated from the Stab 4/5 constructs by substituting the ribonucleotides in all purine positions with deoxyribonucleotides. Another fully modified construct, Stab 7/8, was generated by replacing all purine positions in the antisense strand with 2′-O-methyl nucleotides. This proved to be the most stable antisense strand chemistry observed, with t½=816 hours in human liver extract.

[0893] The dramatic stability of Stab 8 modifications was also observed when non-duplexed single strands were incubated in human serum and liver extract, as shown in Table VII. An approximate five-fold increase in serum stability is seen for the double stranded constructs, compared to that observed for the individual strands. In liver extract, the siNA duplex provides even greater stability compared to the single strands. For example, the Stab 5 chemistry is greater than 100-fold more stable in the Stab 4/5 duplex relative to its stability alone.

[0894] Terminal modifications have a large impact on stability in human serum, as can be seen from a comparison of sense verses antisense stabilities in duplex form, and the Stab 4 and Stab 5 single-strand stabilities. Therefore, a number of 3′ antisense capping moieties on Stab 4/5 chemistry duplexes were assessed for their contribution to stability in human serum. The structures of these modifications are shown in FIG. 22, and resultant half-lives are shown in Table VIII. A wide range of different stabilities were observed, from half-lives as short as one hour to greater than 770 hours. Thus, in the context of 2′-fluoro modified pyrimidines, 3′-exonuclease becomes the primary mode of attack on duplexes in human serum; a number of chemistries minimize this site of attack. These results suggest that susceptibility to 3′ exonucleases is a major path to degradation in the serum.

### Example 23

### Activity of siNA Molecules Delivered Via Hydrodynamic Injection

[0895] An in vivo mouse model that utilizes hydrodynamic tail vein injection of a replication competent HBV vector has been used to assess the activity of chemically stabilized siRNA targeted to HBV RNA. The hydrodynamic delivery of nucleic acids in the mouse has been described by Liu et al., 1999, Gene Therapy, 6, 1258-1266, who showed that the vast majority of the nucleic acid is delivered to the liver by this technique. The use of the hydrodynamic technology to develop a HBV mouse model has been described by Yang et al., 2002, PNAS, 99, 13825-13830. In the vector-based model, HBV replicates in the liver for approximately 10 days, resulting in detectable levels of HBV RNA and antigens in the liver and HBV DNA and antigens in the serum.

[0896] To assess the activity of chemically stabilized siNAs against HBV, co-injection of the siNAs along with the HBV vector was done in mouse strain C57BL/J6. The HBV vector used, pWTD, is a head-to-tail dimer of the complete HBV genome (see for example Buckwold et al., 1996, J. Virology, 70, 5845-5851). For a 20 gram mouse, a total injection of 1.6 ml containing 10 μg or 1 μg of pWTD and 100 μg of siNA duplex in saline, was injected into the tail vein within 5 seconds. For a larger mouse, the volume is scaled to maintain a level of 140% of the blood volume of the mouse. The injection is done using a 3 cc syringe and 27 g½ needle. The animals were sacrificed at 72 hrs post-injection. Animals were treated with siNA constructs and matched chemistry inverted controls. Analysis of the HBV DNA (FIG. 80) and HBsAg (FIG. 81) levels in serum was conducted by real-time PCR and ELISA respectively. The levels of HBV RNA in the liver (FIG. 82) were analyzed by real-time RT-PCR. In a separate experiment, analysis of HBV DNA levels in serum was carried out at 5 days and 7 days (FIG. 83) after co-injection of siNA and the HBV vector.

[0897] This same model was used to evaluate the efficacy of siNA formulated with polyethyleneimine polyethylene glycol tri-N-acetyl-galactosamine (PEI-PEG-triGAL, FIG. 93). Active siNA (Compound # 31335/31337) formulations were compared to inactive inverted control siNA (Compound #31336/31338) formulations. In order to allow recovery of the liver from the disruption caused by HDI, systemic dosing was started 96 hrs post-HDI. Each group received two days of dosing, and the animals were then sacrificed 24 hrs after the last dose. Animals were dosed with siNA formulated with PEI-PEG-triGal at siNA concentrations of 0.1, 0.3, and 1.0 mg/kg/day. Analysis of the HBV DNA (FIG. 91) and HBsAg (FIG. 92) levels in serum was conducted by real-time PCR and ELISA respectively. The levels of HBV RNA in the liver are analyzed by real-time RT-PCR. As shown in the figures, the active PEI-PEG-triGAL siNA formulation shows significant inhibition of HBV DNA and HBsAg levels in serum compared to the inactive formulation.

### Example 23

### In Vivo Activity of Systemically Dosed siNA Molecules Delivered Via Intravenous Administration

[0898] Once the in vivo potency modified siNA against HBV was demonstrated by co-administration by HDI as described above, the level of anti-HBV activity of the molecule systemically dosed via conventional intravenous injection was investigated following the HDI delivery of the HBV vector. Since there have been reports of initial liver damage following hydrodynamic injection, dosing of siNAs was begun 72 hours post HDI. Examination of both liver ALT/AST levels and histopathology following HDI confirmed reports in the literature that the liver returns to near normal status by 72 hrs after the initial HDI induced injury (data not shown). To assess in vivo activity of systemically dosed siNA, 0.3 ug of the pWTD HBV vector was HDI administered, and 72 hours later the siNA or inverted controls were dosed via standard intravenous injection at 30, 10, or 3 ug/kg TID for 2 days. The animals were sacrificed 18 hours after the last dose and levels of serum HBV DNA were examined. FIG. 102 shows log 10 copies/ml of serum HBV DNA for the siNA (Stab 7/8 33214/33254, Table III), inverted control (Stab 7/8 33578/33579, Table III), and saline treated groups. A dose dependent reduction in serum HBV DNA levels was observed in the siNA treated groups in comparison to the inverted control or saline groups. A statistically significant (P<0.01) reduction of 0.93 log was observed in the 30 mg/kg group as compared to the saline group. This result demonstrates in vivo activity of a systemically administered siNA. FIG. 103 shows activity of a fully stabilized siNA (Stab Active=33214/33254, Table III) construct compared to a matched chemistry inverted control (Stab Inv=33578/33579, Table III), an all RNA siNA construct having identical sequence (RNA active) and a corresponding all RNA inverted control (RNA Inv) in the HBV Co-HDI mouse model described above. A hydrodynamic tail vein injection (HDI) containing 1 ug of the pWTD HBV vector and 0, 0.03, 0.1, 0.3 or 1.0 ug of siNA was performed on C57BL/J6 mice. Active siNA duplexes and inverted sequence controls in both native RNA and stabilized chemistry were tested. The levels of serum HBV DNA and HBsAg were measured 72 hrs post injection. A dose dependent reduction in both HBV DNA and HBsAg levels was observed with both the native RNA and stabilized siNAs. However, the magnitude of the reduction observed in the stabilized siNAs treated groups was 1.5 log greater for both endpoints at the high dose level. FIG. 103A shows results for HBV serum DNA levels, FIG. 103B shows results for serum HBsAg levels, and FIG. 103C shows results for liver HBV RNA levels in this study.

### Example 24

### Activity Screens Using Chemically Modified siNA

[0899] Two formats can be used to identify active chemically modified siNA molecules against target nucleic acid molecules (e.g., RNA). One format involves screening unmodified siNA constructs in an appropriate system (e.g., cell culture or animal models) then applying chemical modifications to the sequence of identified leads and rescreening the modified constructs. Another format involves direct screening of chemically modified constructs to identify chemically modified leads (see for example the Stab 7/8 HCV screen shown in FIG. 86 and the Stab 7/8 HBV screen shown FIG. 87, as described above). The latter approach can be useful in identifying active constructs that are specific to various combinations of chemical modifications (e.g., Stab 1-18 chemistries shown in Table V herein). Additionally, different iterations of such chemical modifications can be assessed using active chemically modified leads and appropriate rules for selective active constructs given a particular chemistry can be established using this approach. Non-limiting examples of such activity screen are described below.

Activity Screen of Stab 7/8 Constructs Targeting Luciferase RNA

[0900] HeLa cells were co-transfected with pGF3 vector (250 ng/well), renilla luciferase vector (10 ng/well) and siNA (0.5-25 nM) using 0.5 ul lipofectamine 2000 per well. Twenty-four hours post-transfection, the cells were assayed for luciferase activity using the Promega Dual Luciferase Assay Kit per the manufacturer's instruction. siNA constructs having high levels of activity were identified and tested in a dose response assay with concentrations ranging from 0.5 to 25 nM. Results for siNA constructs targeting sites 80, 237, and 1478 are shown in FIG. 84 and sites 1544 and 1607 are shown in FIG. 85. As shown in the Figures, several active Stab 7/8 constructs were identified that demonstrate potent dose related inhibition of luciferase expression.

Activity Screen of Combination siNA Constructs Targeting HBV RNA in HepG2 Cells

[0901] The HBV HepG2 cell culture system described in Example 13 above was utilized to evaluate the efficacy of various combinations of chemical modifications (Table V) in the sense strand and antisense strand of siNA molecules as compared to matched chemistry inverted controls. To determine siNA activity, HbsAg levels were measured following transfection with siNA. Immulon 4 (Dynax) microtiter wells were coated overnight at 4° C. with anti-HBsAg Mab (Biostride B88-95-31ad,ay) at 1 μg/ml in Carbonate Buffer (Na2CO3 15 mM, NaHCO3 35 mM, pH 9.5). The wells were then washed 4× with PBST (PBS, 0.05% Tween® 20) and blocked for 1 hr at 37° C. with PBST, 1% BSA. Following washing as above, the wells were dried at 37° C. for 30 min. Biotinylated goat ant-HBsAg (Accurate YVS1807) was diluted 1:1000 in PBST and incubated in the wells for 1 hr. at 37° C. The wells were washed 4× with PBST. Streptavidin/Alkaline Phosphatase Conjugate (Pierce 21324) was diluted to 250 ng/ml in PBST, and incubated in the wells for 1 hr. at 37° C. After washing as above, p-nitrophenyl phosphate substrate (Pierce 37620) was added to the wells, which were then incubated for 1 hour at 37(C. The optical density at 450 nm was then determined. Results of the combination HBV siNA screen are shown in FIGS. 88-90. As shown in the Figures, the various combinations of differing sense and antisense chemistries (e.g., sense/antisense constructs having Stab 7/8, 7/10, 7/11, 9/8, 9/10, 6/10, 16/8, 16/10, 18/8, 18/10, 4/8, 4/10, 7/5, 9/5, and 9/11 chemistry) result in active siNA constructs.

### Example 25

### Duplex Forming Oligonucleotide Mediated Inhibition of Gene Expression

Palindromic Frequency Determination

[0902] In designing DFO constructs, the search for palindromic sites in target sequences can provide target sites well suited for DFO mediated inhibition of gene expression, as opposed to randomly screening sites for activity with non-DFO oligonucleotides. The length of palindrome can define the overall length of the DFO. The probability of the occurrence of various palindromes was calculated ranging from 6 nucleotides to 14 nucleotides in an artificially generated 200K-gene sequence via a MICROSOFT EXCEL algorithm (see FIG. 107). The simulation revealed that 6-mer palindromes typically occur once for every given 64-nucleotide sequence. An 8-mer palindrome was found to occur once for every 250-nucleotide sequence. These calculated frequencies matched well with the observed frequencies of palindrome in defined target sequences. This allowed the estimation that approximately 78 6-mer palindromes should exist on average in any given 5K gene. Evaluation for the presence of 6-mer palindromes in various genes resulted in a large number of palindromic sites identified (see FIG. 108). This algorithm considers only the Watson-Crick base pairs and excludes the presence of any mismatched and wobble base pairs. Including mismatches, wobble pairs and non-Watson-Crick base pairs can result in a large number of semi-palindromic sites suitable for the design of minimal duplex forming oligonucleotides.

[0903] To test the hypothesis that palindromic sites could be used for design and search for self-complementary oligos capable of inducing RNAi in mammalian cells, we randomly selected 12 palindromic sites in mTGFbR1 gene. These sites were included in the design of single strand siRNA as described previously. None of these siRNAs contained TT overhangs in duplex form but contained an inverted abasic nucleotide to protect from 3′-exonucleases. Analysis of these DFOs for the RNAi response in E147Ts cells resulted in 4 out of 12 sequences that reduced mRNA levels to less than or equal to 40% at 25 nM concentration. Retesting the active sequences on a different day resulted in mRNA knock down by approximately 80%.

[0904] Identification of 4 active DFOs out of 12 is of the same order as the screening of standard 21 bp siRNA duplexes for RNAi response. This indicates that self-complementary oligos could be an alternative for the design of second-generation drugs based on RNAi mechanism.

Self Complementary DFO Constructs Targeting VEGFR1

[0905] Using the methods described herein, self complementary DFO constructs comprising palindrome or repeat nucleotide sequences were designed against VEGFR1 target RNA. These DFO constructs utilized the identification of palindromic or repeat sequences in a target nucleic acid sequence of interest, generally these palindrome/repeat sequences comprise about 2 to about 12 nucleotides in length were are selected to originate at the 5′-region of the target nucleic acid sequence. A nucleotide sequence that was complementary to target nucleic acid sequence adjacent (3′) to the palindrome/repeat sequence was incorporated at the 5′-end of the palindrome/repeat sequence in the DFO molecule. Lastly, a nucleic sequence that was inverse repeat of the sequence at the 5′ end of the palindrome/repeat sequence was inserted at the 3′ end of the palindrome/repeat sequence such that the full length DFO sequence comprised self complementary sequence. This design of DFO construct allows for the formation of a duplex oligonucleotide in which both strands comprise the same sequence (e.g., see FIG. 94). Generally, the longer the repeat identified in the target nucleic acid sequence, the shorter the resulting DFO sequence will be. For example, if the target sequence is 17 nucleotides in length and there is no repeat found in the sequence, the resulting DFO construct will be, for example, 17+0+17=34 nucleotides in length. The first 17 nucleotides represent sequence complementary to the target nucleic acid sequence, the 0 represents the lack of a palindrome sequence, and the second 17 nucleotides represent inverted repeat sequence of the first 17 nucleotides. If a 2 nucleotide repeat is utilized, the resulting DFO construct will be, for example, 15+2+15=32 nucleotides in length. If a 4 nucleotide repeat is utilized, the resulting DFO construct will be, for example, 13+4+13=30 nucleotides in length. If a 6 nucleotide repeat is utilized, the resulting DFO construct will be, for example, 11+6+11=28 nucleotides in length. If a 8 nucleotide repeat is utilized, the resulting DFO construct will be, for example, 9+8+9=26 nucleotides in length. If a 10 nucleotide repeat is utilized, the resulting DFO construct will be, for example, 7+10+7=24 nucleotides in length. If a 12 nucleotide repeat is utilized, the resulting DFO construct will be, for example, 5+12+5=22 nucleotides in length and so forth. Thus, for each nucleotide reduction in the target site, the DFO length can be shortened by 2 nucleotides. These same principles can be utilized for a target site having different length nucleotide sequences, such as target sites comprising 14 to 24 nucleotides. In addition, various combinations of 5′ and 3′ overhang sequences (e.g., TT) can be introduced to the DFO constructs designed with palindrome/repeat sequences. Furthermore, palindrome/repeat sequences can be added to the 5′-end of a DFO sequence having complementarity to any target nucleic acid sequence of interest, enabling self complementary palindrome/repeat DFO constructs to be designed against any target nucleic acid sequence (see for example FIGS. 95-96).

[0906] Self complementary DFO palindrome/repeat sequences shown in Table I (compound # 32808, 32809, 32810, 32811, and 32812) were designed against VEGFR1 RNA targets and were screened in cell culture experiments along with chemically modified siNA constructs (compound #s 32748/32755, 33282/32289, 31270/31273) with known activity with matched chemistry inverted controls (compound #s 32772/32779, 32296/32303, 31276/31279) and untreated cells along with a transfection control (LF2K), see FIG. 105. HAEC cells were transfected with 0.25 ug/well of lipid complexed with 25 nM DFO targeting VEGFR1 site 1229. Cells were incubated at 37° for 24 h in the continued presence of the DFO transfection mixture. At 24 h, RNA was prepared from each well of treated cells. The supernatants with the transfection mixtures were first removed and discarded, then the cells were lysed and RNA prepared from each well. Target gene expression following treatment was evaluated by RT-PCR for the VEGFR1 mRNA and for a control gene (36B4, an RNA polymerase subunit) for normalization. Compound # 32812, a 29 nucleotide self complementary DFO construct targeting VEGFR1 site 1229 displayed potent inhibition of VEGFR1 RNA expression in this system (see for example FIG. 105).

Self Complementary DFO Constructs Targeting HBV RNA

[0907] Self complementary DFO constructs comprising palindrome or repeat nucleotide sequences (see Table I) were designed against HBV target RNA and were screened in HepG2 cells. Transfection of the human hepatocellular carcinoma cell line, Hep G2, with replication-competent HBV DNA results in the expression of HBV proteins and the production of virions. The human hepatocellular carcinoma cell line Hep G2 was grown in Dulbecco's modified Eagle media supplemented with 10% fetal calf serum, 2 mM glutamine, 0.1 mM nonessential amino acids, 1 mM sodium pyruvate, 25 mM Hepes, 100 units penicillin, and 100 μg/ml streptomycin. To generate a replication competent cDNA, prior to transfection the HBV genomic sequences are excised from the bacterial plasmid sequence contained in the psHBV-1 vector. Other methods known in the art can be used to generate a replication competent cDNA. This was done with an EcoRI and Hind III restriction digest. Following completion of the digest, a ligation was performed under dilute conditions (20 μg/ml) to favor intermolecular ligation. The total ligation mixture was then concentrated using Qiagen spin columns.

[0908] To test the efficacy of DFOs targeted against HBV RNA, DFO duplexes targeting HBV pregenomic RNA were co-transfected with HBV genomic DNA once at 25 nM with lipid at 12.5 ug/ml into Hep G2 cells, and the subsequent levels of secreted HBV surface antigen (HBsAg) were analyzed by ELISA. A DFO construct comprising self complementary sequence (compound # 32221) was assayed with a chemically modified siNA targeting HBV site 1580 (compound # 31335/31337), a corresponding matched chemistry inverted control (compound # 31336/31338), and untreated cells. The self complementary DFO construct was tested both as a preannealed duplex (compound # 32221) or as a single stranded hairpin (compound # 32221 fold), as confirmed by gel electrophoresis, (see FIG. 106). Immulon 4 (Dynax) microtiter wells were coated overnight at 4° C. with anti-HBsAg Mab (Biostride B88-95-31ad,ay) at 1 μg/ml in Carbonate Buffer (Na2CO3 15 μM, NaHCO3 35 mM, pH 9.5). The wells were then washed 4× with PBST (PBS, 0.05% Tween® 20) and blocked for 1 hr at 37° C. with PBST, 1% BSA. Following washing as above, the wells were dried at 37(C for 30 min. Biotinylated goat anti-HBsAg (Accurate YVS1807) was diluted 1:1000 in PBST and incubated in the wells for 1 hr. at 37(C. The wells were washed 4× with PBST. Streptavidin/Alkaline Phosphatase Conjugate (Pierce 21324) was diluted to 250 ng/ml in PBST, and incubated in the wells for 1 hr. at 37(C. After washing as above, p-nitrophenyl phosphate substrate (Pierce 37620) was added to the wells, which were then incubated for 1 hour at 37(C. The optical density at 450 nm was then determined. As shown in FIG. 106, the self complementary DFO construct 32221 in duplex form shows significant inhibition of HBsAg.

Self Complementary DFO Constructs Targeting TGF-Beta Receptor RNA

[0909] Using the methods described herein, self complementary DFO constructs comprising palindrome or repeat nucleotide sequences were designed against TGF-beta receptor target RNA. Self complementary DFO palindrome/repeat sequences shown in Table I (e.g., compound # 35038, 35041, 35044, and 35045) were designed against TGF-beta receptor RNA targets and were screened in cell culture experiments and irrelevant controls (Control 1, Control 2) and untreated cells along with a transfection control (LF2K), see FIG. 109. NMuMg cells were transfected with 0.5 uL/well of lipid complexed with 25 and 100 nM DFO. Cells were incubated at 37° for 24 h in the continued presence of the DFO transfection mixture. At 24 h, RNA was prepared from each well of treated cells. The supernatants with the transfection mixtures were first removed and discarded, then the cells were lysed and RNA prepared from each well. Target gene expression following treatment was evaluated by RT-PCR for the TGF-beta receptor mRNA and for a control gene (36B4, an RNA polymerase subunit) for normalization. As shown in FIG. 109, the DFO constructs displayed potent inhibition of TGF-beta receptor RNA expression in this system.

### Example 26

### Multifunctional siNA Mediated Inhibition of Gene Expression

Multifunctional siNA Design

[0910] Once target sites have been identified for multifunctional siNA constructs, each strand of the siNA is designed with a complementary region of length, for example, between about 18 and about 28 nucleotides, that is complementary to a different target nucleic acid sequence. Each complementary region is designed with an adjacent flanking region of about 4 to about 22 nucleotides that is not complementary to the target sequence, but which comprises complementarity to the complementary region of the other sequence (see for example FIG. 96). Hairpin constructs can likewise be designed (see for example FIG. 97). Identification of complementary, palindrome or repeat sequences that are shared between the different target nucleic acid sequences can be used to shorten the overall length of the multifunctional siNA constructs (see for example FIGS. 98 and 99).

[0911] In a non-limiting example, a multifunctional siNA is designed to target two separate nucleic acid sequences. The goal is to combine two different siNAs together in one siNA that is active against two different targets. The siNAs are joined in a way that the 5′ of each strand starts with the “antisense” sequence of one of two siRNAs as shown in italics below.

SEQ ID NO:1124

3′ TTAGAAACCAGACGUAAGUGU GGUACGACCUGACGACCGU 5′

SEQ ID NO:1125

5′ UCUUUGGUCUGCAUUCACAC CAUGCUGGACUGCUGGCATT 3′

[0912] RISC is expected to incorporate either of the two strands from the 5′ end. This would lead to two types of active RISC populations carrying either strand. The 5′ 19 nt of each strand will act as guide sequence for degradation of separate target sequences.

[0913] In another example, the size of multifunctional siNA molecules is reduced by either finding overlaps or truncating the individual siNA length. The exemplary exercise described below indicates that for any given first target sequence, a shared complementary sequence in a second target sequence is likely to be found.

[0914] The number of spontaneous matches of short polynucleotide sequences (e.g., less than 14 nucleotides) that are expected to occur between two longer sequences generated independent of one another was investigated. A simulation using the uniform random generator SAS V8.1 utilized a 4,000 character string that was generated as a random repeating occurrence of the letters {ACGU}. This sequence was then broken into the nearly 4000 overlapping sets formed by taking S1 as the characters from positions (1, 2 . . . n), S2 from positions (2, 3 . . . , n+1) completely through the sequence to the last set, S 4000-n+1 from position (4000-n+1, . . . , 4000). This process was then repeated for a second 4000 character string. Occurrence of same sets (of size n) were then checked for sequence identity between the two strings by a sorting and match-merging routine. This procedure was repeated for sets of 9-11 characters. Results were an average of 55 matching sequences of length n=9 characters (range 39 to 72); 13 common sets (range 6 to 18) for size n=10, and 4 matches on average (range 0 to 6) for sets of 11 characters. The choice of 4000 for the original string length is approximately the length of the coding region of both VEGFR1 and VEGFR2. This simple simulation suggests that any two long coding regions formed independent of one-another will share common short sequences that can be used to shorten the length of multifunctional siNA constructs. In this example, common sequences of size 9 occurred by chance alone in >1% frequency.

[0915] Below is an example of a multifunctional siNA construct that targets VEGFR1 and VEGFR2 in which each strand has a total length of 24 nt with a 14 nt self complementary region (underline). The antisense region of each siNA ‘1’ targeting VEGFR1 and siNA ‘2’ targeting VEGFR2 (complementary regions are shown in italic) are used

| | |
|---|---|
| siNA ‘1’ | |
| 5′ CAAUUAGAGUGGCAGUGAG | (SEQ ID NO:1126) |
| 3′ GUUAAUCUCACCGUCACUC | (SEQ ID NO:1127) |
| sINA ‘2’ | |
| AGAGUGGGAGUGAGCAAAG 5′ | (SEQ ID NO:1128) |
| UCUCACCGUCACUCGUUUC 3′ | (SEQ ID NO:1129) |
| Multifunctional siNA | |
| CAAUUAGAGUGGCAGUGAGCAAAG | (SEQ ID NO:1130) |
| GUUAAUCUCACCGUCACUCGUUUC | (SEQ ID NO:1131) |

[0916] In another example, the length of a multifunctional siNA construct is reduced by determining whether fewer base pairs of sequence homology to each target sequence can be tolerated for effective RNAi activity. If so, the overall length of multifunctional siNA can be reduced as shown below. In the following hypothetical example, 4 nucleotides (bold) are reduced from each 19 nucleotide siNA ‘1’ and siNA ‘2’ constructs. The resulting multifunctional siNA is 30 base pairs long.

| | |
|---|---|
| siNA ‘1’ | |
| 5′ CAAUUAGAGUGGCAGUGAG | (SEQ ID NO:1126) |
| 3′ GUUAAUCUCACCGUGACUC | (SEQ ID NO:1127) |
| siNA ‘2’ | |
| AGAGUGGCAGUGAGCAAAG 5′ | (SEQ ID NO:1128) |
| UCUCACCGUCACUCGUUUC 3′ | (SEQ ID NO:1129) |
| Multifunctional siNA | |
| CAAUUAGAGUGGCAGUGGCAGUGAGCAAAG | (SEQ ID NO:1132) |
| GUUAAUGUCACCGUCACCGUCACUCGUUUC | (SEQ ID NO:1133) |

Multifunctional siNA Constructs Targeting HBV and PKC-Alpha RNA

[0917] In a non-limiting example, multifunctional siNA constructs targeting HBV and PKC-alpha RNA were evaluated for activity (see FIGS. 110 and 111). Multifunctional siNAs are referred to by compound numbers cross referenced in Table I. Total RNA was prepared from HepG2 cells 72 h after treatment with 25 nM normal (single target) and bifunctional siNAs. Quantitative RT-PCR was performed using the Invitrogen SuperScript III Platinum One-Step Quantitative RT-PCR System on an ABI PRISM 7700 Sequence Detector instrument. PCR products were normalized against those for 36B4. PKC-alpha site 1143 is targeted by the PKC-alpha-only and HBV-PKC-alpha combination siNAs. As shown if FIG. 110, the multifunctional siNAs targeting HBV-PKC-alpha (34710/34711 and 34712/34713) are effective in inhibiting HBV RNA expression at levels similar to individual siNA molecules targeting HBV sites 263 and 1583, as compared to appropriate controls (HBV inverted control siNA to site 263; irrelevant bifunctional VEGFR1/VEGF control; and a siNA construct targeting PKC-alpha site 1143 only). As shown if FIG. 111, the multifunctional siNAs targeting HBV-PKC-alpha (34710/34711 and 34712/34713) are effective in inhibiting PKC-alpha RNA expression at levels similar to an individual siNA molecule targeting PKC-alpha site 1143, as compared to appropriate controls (irrelevant bifunctional VEGFR1/VEGF control; and siNA constructs targeting HBV sites 263 and 1583, and untreated cells).

Additional Multifuctional siNA Designs

[0918] Three categories of additional multifunctional siNA designs are presented that allow a single siRNA molecule to silence multiple targets. The first method utilizes linkers to join siNAs (or multifunctional siNAs) in a direct manner. This can allow the most potent siNAs to be joined without creating a long, continuous stretch of RNA that has potential to trigger an interferon response. The second method is a dendrimeric extension of the overlapping or the linked multifunctional design; or alternatively the organization of siNA in a supramolecular format. The third method uses helix lengths greater than 30 base pairs. Processing of these siNAs by Dicer will reveal new, active 5′ antisense ends. Therefore, the long siNAs can target the sites defined by the original 5′ ends and those defined by the new ends that are created by Dicer processing. When used in combination with traditional multifunctional siNAs (where the sense and antisense strands each define a target) the approach can be used for example to target 4 or more sites.

I. Tethered Bifunctional siNAs

[0919] The basic idea is a novel approach to the design of multifunctional siNAs in which two antisense siNA strands are annealed to a single sense strand. The sense strand oligonucleotide contains a linker (e.g., non-nucleotide linker as described herein) and two segments that anneal to the antisense siNA strands (see FIG. 112). The linkers can also optionally comprise nucleotide-based linkers. Several potential advantages and variations to this approach include, but are not limited to:
[0920] 1. The two antisense siNAs are independent. Therefore, the choice of target sites is not constrained by a requirement for sequence conservation between two sites. Any two highly active siNAs can be combined to form a multifunctional siNA.
[0921] 2. When used in combination with target sites having homology, siNAs that target a sequence present in two genes (e.g., Flt-1 site 3646, which targets VEGF-R1 and R2), the design can be used to target more than two sites. A single multifunctional siNA can be for example, used to target VEGF R1 RNA and VEGF R2 RNA (using one antisense strand of the multifunctional siNA targeting of conserved sequence between to the two RNAs) and VEGF RNA (using the second antisense strand of the multifunctional siNA targeting VEGF RNA This approach allows targeting of the cytokins and its two main receptors using a single multifunctional siNA.
[0922] 3. Multifunctional siNAs that use both the sense and antisense strands to target a gene can also be incorporated into a tethered multifuctional design. This leaves open the possibility of targeting 64 or more sites with a single complex.
[0923] 4. It can be possible to anneal more than two antisense trandssiNAs to a single tethered sense strands.
[0924] 5. The design avoids long continuous stretches of dsRNA. Therefore, it is less likely to initiate an interferon response.
[0925] 6. The linker (or modifications attached to it, such as conjugates described herein) can improve the pharmacokinetic properties of the complex or improve its incorporation into liposomes. Modifications introduced to the linker should not impact siNA activity to the same extent that they would if directly attached to the siNA (see for example FIGS. 118 and 119).
[0926] 7. The sense strand can extend beyond the annealed antisense strands to provide additional sites for the attachment of conjugates.
[0927] 8. The polarity of the complex can be switched such that both of the antisense 3′ ends are adjacent to the linker and the 5′ ends are distal to the linker or combination thereof.
   Dendrimer and Supramolecular siNAs

[0928] In the dendrimer siNA approach, the synthesis of siNA is initiated by first synthesizing the dendrimer template followed by attaching various functional siNAs. Various constructs are depicted in FIG. 113. The number of functional siNAs that can be attached is only limited by the dimensions of the dendrimer used.

Supramolecular Approach to Multifunctional siNA

[0929] The supramolecular format simplifies the challenges of dendrimer synthesis. In this format, the siNA strands are synthesized by standard RNA chemistry, followed by annealing of various complementary strands. The individual strand synthesis contains an antisense sense sequence of one siNA at the 5′-end followed by a nucleic acid or synthetic linker, such as hexaethyleneglyol, which in turn is followed by sense strand of another siNA in 5′ to 3′ direction. Thus, the synthesis of siNA strands can be carried out in a standard 3′ to 5′ direction. Representative examples of trifunctional and tetrafunctional siNAs are depicted in FIG. 114. Based on a similar principle, higher functionality siNA constructs can be designed as long as efficient annealing of various strands is achieved.

Dicer Enabled Multifunctional siNA

[0930] Using bioinformatic analysis of multiple targets, stretches of identical sequences shared between differing target sequences can be identified ranging from about two to about fourteen nucleotides in length. These identical regions can be designed into extended siNA helixes (e.g., >30 base pairs) such that the processing by Dicer reveals a secondary functional 5′-antisense site (see for example FIG. 115). For example, when the first 17 nucleotides of a siNA antisense strand (e.g., 21 nucleotide strands in a duplex with 3′-TT overhangs) are complementary to a target RNA, robust silencing was observed at 25 nM. 80% silencing was observed with only 16 nucleotide complementarity in the same format (see FIG. 117).

[0931] Incorporation of this property into the designs of siNAs of about 30 to 40 or more base pairs results in additional multifunctional siNA constructs. The example in FIG. 115 illustrates how a 30 base-pair duplex can target three distinct sequences after processing by Dicer-RNaseIII; these sequences can be on the same mRNA or separate RNAs, such as viral and host factor messages, or multiple points along a given pathway (e.g., inflammatory cascades). Furthermore, a 40 base-pair duplex can combine a bifunctional design in tandem, to provide a single duplex targeting four target sequences. An even more extensive approach can include use of homologous sequences (e.g. VEGFR-1/VEGFR-2) to enable five or six targets silenced for one multifunctional duplex. The example in FIG. 115 demonstrates how this can be achieved. A 30 base pair duplex is cleaved by Dicer into 22 and 8 base pair products from either end (8 b.p. fragments not shown). For ease of presentation the overhangs generated by dicer are not shown—but can be compensated for. Three targeting sequences are shown. The required sequence identity overlapped is indicated by grey boxes. The N's of the parent 30 b.p. siNA are suggested sites of 2′-OH positions to enable Dicer cleavage if this is tested in stabilized chemistries. Note that processing of a 30mer duplex by Dicer RNase III does not give a precise 22+8 cleavage, but rather produces a series of closely related products (with 22+8 being the primary site). Therefore, processing by Dicer will yield a series of active siNAs. Another non-limiting example is shown in FIG. 116. A 40 base pair duplex is cleaved by Dicer into 20 base pair products from either end. For ease of presentation the overhangs generated by dicer are not shown—but can be compensated for. Four targeting sequences are shown in four colors, blue, light-blue and red and orange. The required sequence identity overlapped is indicated by grey boxes. This design format can be extended to larger RNAs. If chemically stabilized siNAs are bound by Dicer, then strategically located ribonucleotide linkages can enable designer cleavage products that permit our more extensive repertoire of multifunctional designs. For example cleavage products not limited to the Dicer standard of approximately 22-nucleotides can allow multifunctional siNA constructs with a target sequence identity overlap ranging from, for example, about 3 to about 15 nucleotides.

[0932] Another important aspect of this approach is its ability to restrict escape mutants. Processing to reveal an internal target site can ensure that escape mutations complementary to the eight nucleotides at the antisense 5′ end will not reduce siNA effectiveness. If about 17 nucleotides of complementarity are required for RISC-mediated target cleavage, this will restrict, for example 8/17 or 47% of potential escape mutants.

### Example 27

### siNA Length and Base Pair Walking Experiments siNA Length Walk

[0933] An experiment was designed to determine the effect of based paired sequence length of siNA constructs on RNAi efficacy. A well characterized site for siNA mediated inhibition, HBV RNA site 263 was chosen and siNA molecules ranging in length from 19 to 39 ribonucleotide base pairs in length with 3′-terminal dinucleotide TT overhangs. Transfection of the human hepatocellular carcinoma cell line, Hep G2, with replication-competent HBV DNA results in the expression of HBV proteins and the production of virions. To test the efficacy of differing length siNAs targeted against HBV RNA, several siNA duplexes targeting site 263 within HBV pregenomic RNA were co-transfected with HBV genomic DNA once at 25 nM with lipid at 12.5 ug/ml into Hep G2 cells, and the subsequent levels of HBV RNA analyzed by RT PCR compared to cells treated with an inverted siNA control to site 263 and untreated cells. Results are summarized in FIG. 120. As shown in the figure, the siNA constructs from 19 to 39 base pairs were all efficacious in inhibiting HBV RNA in this system.

siNA Length Walk

[0934] An experiment was designed to determine the effect of varying the number of nucleotides complementary to a target RNA within a fixed length siNA on RNAi efficacy. siNA molecules ranging from 14 to 18 ribonucleotide base pairs with a fixed length of 21 nucleotides that included 3′-terminal dinucleotide TT overhangs were designed to target HBV site 263 RNA. Transfection of the human hepatocellular carcinoma cell line, Hep G2, with replication-competent HBV DNA results in the expression of HBV proteins and the production of virions. To test the efficacy of differing base pair composition siNAs targeted against HBV RNA, the siNA duplexes targeting site 263 within HBV pregenomic RNA were co-transfected with HBV genomic DNA once at 25 nM with lipid at 12.5 ug/ml into Hep G2 cells, and the subsequent levels of HBV RNA analyzed by RT PCR as compared to cells treated with an inverted siNA control to site 263 and untreated cells. Results are summarized in FIG. 117. As shown in the figure, the siNA constructs with 16, 17, and 18 base pairs within a 21 nucleotide construct Were all efficacious in inhibiting HBV RNA in this system, whereas the corresponding 16, 17, and 18 base pair constructs with an overall length of 18, 19, and 20 nucleotides respectively were also efficacious, but to a lesser extent. As such, this data suggests that the overall length of a siNA can be more determinative in providing RNAi efficacy than the absolute number of base paired nucleotides. For example, a siNA having fewer than 19 base pairs (e.g. 18, 17, or 16 base pairs) within a longer oligonucleotide (e.g. 20 or more nucleotides) can still be effective in mediating RNA interference.

[0935] All patents and publications mentioned in the specification are indicative of the levels of skill of those skilled in the art to which the invention pertains. All references cited in this disclosure are incorporated by reference to the same extent as if each reference had been incorporated by reference in its entirety individually.

[0936] One skilled in the art would readily appreciate that the present invention is well adapted to carry out the objects and obtain the ends and advantages mentioned, as well as those inherent therein. The methods and compositions described herein as presently representative of preferred embodiments are exemplary and are not intended as limitations on the scope of the invention. Changes therein and other uses will occur to those skilled in the art, which are encompassed within the spirit of the invention, are defined by the scope of the claims.

[0937] It will be readily apparent to one skilled in the art that varying substitutions and modifications can be made to the invention disclosed herein without departing from the scope and spirit of the invention. Thus, such additional embodiments are within the scope of the present invention and the following claims. The present invention teaches one skilled in the art to test various combinations and/or substitutions of chemical modifications described herein toward generating nucleic acid constructs with improved activity for mediating RNAi activity. Such improved activity can comprise improved stability, improved bioavailability, and/or improved activation of cellular responses mediating RNAi. Therefore, the specific embodiments described herein are not limiting and one skilled in the art can readily appreciate that specific combinations of the modifications described herein can be tested without undue experimentation toward identifying siNA molecules with improved RNAi activity.

[0938] The invention illustratively described herein suitably can be practiced in the absence of any element or elements, limitation or limitations that are not specifically disclosed herein. Thus, for example, in each instance herein any of the terms “comprising”, “consisting essentially of”, and “consisting of” may be replaced with either of the other two terms. The terms and expressions which have been employed are used as terms of description and not of limitation, and there is no intention that in the use of such terms and expressions of excluding any equivalents of the features shown and described or portions thereof, but it is recognized that various modifications are possible within the scope of the invention claimed. Thus, it should be understood that although the present invention has been specifically disclosed by preferred embodiments, optional features, modification and variation of the concepts herein disclosed may be resorted to by those skilled in the art, and that such modifications and variations are considered to be within the scope of this invention as defined by the description and the appended claims.

[0939] In addition, where features or aspects of the invention are described in terms of Markush groups or other grouping of alternatives, those skilled in the art will recognize that the invention is also thereby described in terms of any individual member or subgroup of members of the Markush group or other group.

TABLE I

| | |
|---|---|
| Sirna/ | SEQ |

| | | | |
|---|---|---|---|
| RPI # | Aliases | Sequence | ID # |

| | | | |
|---|---|---|---|
| 25227 | Sirna/RPI 21550 EGFR 3830L23 AS as siNA | B UAACCUCGUACUGGUGCCUCC B | 1 |
| | Str 1 (sense) | | |
| 25228 | Sirna/RPI 21550 EGFR 3830L23 AS as siNA | B GGAGGCACCAGUACGAGGUUA B | 2 |
| | Str 2 (antisense) | | |
| 25229 | Sirna/RPI 21549 EGFR as siNA Str 2 | B AAACUCCAAGAUCCCCAAUCA B | 3 |
| | (antisense) | | |
| 25230 | Sirna/RPI 21549 EGFR 3 as siNA Str 1 | B UGAUUGGGGAUCUUGGAGUUU B | 4 |
| | (sense) | | |
| 25231 | Sirna/RPI 21547 EGFR as siNA Str 2 | B GUUGGAGUCUGUAGGACUUGG B | 5 |
| | (antisense) | | |
| 25232 | Sirna/RPI 21547 EGFR as siNA Str 1 | B CCAAGUCCUACAGACUCCAAC B | 6 |
| | (sense) | | |
| 25233 | Sirna/RPI 21545 EGFR as siNA Str 2 | B GCAAAAACCCUGUGAUUUCCU B | 7 |
| | (antisense) | | |
| 25234 | Sirna/RPI 21545 EGFR as siNA Str 1 | B AGGAAAUCACAGGGUUUUUGC B | 8 |
| | (sense) | | |
| 25235 | Sirna/RPI 21543 EGFR as siNA Str 2 | B UUGGUCAGUUUCUGGCAGUUC B | 9 |
| | (antisense) | | |
| 25236 | Sirna/RPI 21543 EGFR as siNA Str 1 | B GAACUGCCAGAAACUGACCAA B | 10 |
| | (sense) | | |
| 25237 | HCV IRES Loop IIIb (Heptazyme site) as | B GGUCCUUUCUUGGAUCAACCC B | 11 |
| | siNA str1 (sense) | | |
| 25238 | HCV IRES Loop IIIb (Heptazyme site) as | B GGGUUGAUCCAAGAAAGGACC B | 12 |
| | siNA str2 (antisense) | | |
| 25239 | HBV (HepBzyme site) as siNA str1 | B UGGACUUCUCUCAAUUUUCUA B | 13 |
| | (sense) | | |
| 25240 | HBV (HepBzyme site) as siNA str2 | B UAGAAAAUUGAGAGAAGUCCA B | 14 |
| | (antisense) | | |
| 25241 | HBV18371 site as siNA str1 (sense) | B UUUUUCACCUCUGCCUAAUCA B | 15 |
| 25242 | HBV18371 site as siNA str2 (antisense) | B UGAUUAGGCAGAGGUGAAAAA B | 16 |
| 25243 | HBV16372-18373 site as siNA str1 | B CAAGCCUCCAAGCUGUGCCUU B | 17 |
| | (sense) | | |
| 25244 | HBV16372-18373 site as siNA str 2 | B AAGGCACAGCUUGGAGGCUUG B | 18 |
| | (antisense) | | |
| 25245 | Sirna/RPI 17763 Her2Neu AS as siNA Str | B UCCAUGGUGCUCACUGCGGCU B | 19 |
| | 2 (antisense) | | |
| 25246 | Sirna/RPI 17763 Her2Neu AS as siNA Str | B AGCCGCAGUGAGCACCAUGGA B | 20 |
| | 1 (sense) | | |
| 25247 | Sirna/RPI 17763 Her2Neu AS as siNA Str | B AGGUACCACGAGUGACGCCGA B | 21 |
| | 1 (sense) Inverted control | | |
| 25248 | Sirna/RPI 17763 Her2Neu AS as siNA Str | B UCGGCGUCACUCGUGGUACCU B | 22 |
| | 1 (sense) Inverted control compliment | | |
| 25249 | Sirna/RPI 21550 EGFR 3830L23 AS as | B CCUCCGUGGUCAUGCUCCAAU B | 23 |
| | siNA Str 1 (sence) Inverted Control | | |
| 25250 | Sirna/RPI 21550 EGFR 3830L23 AS as | B AUUGGAGCAUGACCACGGAGG B | 24 |
| | siNA Str 1 (sence) Inverted Control | | |
| | Compliment | | |
| 25251 | HCV IRES Loop IIIb (Heptazyme site) | B CCCAACUAGGUUCUUUCCUGG B | 25 |
| | as siNA str1 (sense) Inverted Control | | |
| 25252 | HCV IRES Loop IIIb (Heptazyme site) as | B CCAGGAAAGAACCUAGUUGGG B | 26 |
| | siNA str1 (sense) Inverted Control | | |
| | Compliment | | |
| 25804 | Sirna/RPI 21550 EGFR 3830123 AS as | UAACCUCGUACUGGUGCCUCCUU | 27 |
| | siNA Str 1 (sense) + 2U overhang | | |
| 25805 | Sirna/RPI 21550 EGFR 3830123 AS as siNA | GGAGGCACCAGUACGAGGUUAUU | 28 |
| | Str 2 (antisense) + 2U overhang | | |
| 25806 | Sirna/RPI 21549 EGFR as siNA Str 2 | AAACUCCAAGAUCCCCAAUCAUU | 29 |
| | (antisense) + 2U overhang | | |
| 25824 | Sirna/RPI 21550 EGFR 3830L23 AS as siNA | BUAACCUCGUACUGGUGCCUCCUUB | 30 |
| | Str 1 (sense) + 2U overhang | | |
| 25825 | Sirna/RPI 21550 EGFR 3830L23 AS as siNA | BGGAGGCACCAGUACGAGGUUAUUB | 31 |
| | Str 2 (antisense) + 2U overhang | | |
| 25826 | Sirna/RPI 21549 EGFR as siNA Str 2 | BAAACUCCAAGAUCCCCAAUCAUUB | 32 |
| | (antisense) + 2U overhang | | |
| 25807 | Sirna/RPI 21549 EGFR 3 as siNA Str 1 | UGAUUGGGGAUCUUGGAGUUUUU | 33 |
| | (sense) + 2U overhang | | |
| 25808 | Sirna/RPI 21547 EGFR as siNA Str 2 | GUUGGAGUCUGUAGGACUUGGUU | 34 |
| | (antisense) + 2U overhang | | |
| 25809 | Sirna/RPI 21547 EGFR as siNA Str 1 | CCAAGUCCUACAGACUCCAACUU | 35 |
| | (sense); + 2U overhang | | |
| 25827 | Sirna/RPI 21549 EGFR 3 as siNA Str 1 | BUGAUUGGGGAUCUUGGAGUUUUUB | 36 |
| | (sense) + 2U overhang | | |
| 25828 | Sirna/RPI 21547 EGFR as siNA Str 2 | BGUUGGAGUCUGUAGGACUUGGUUB | 37 |
| | (antisense) + 2U overhang | | |
| 25829 | Sirna/RPI 21547 EGFR as siNA Str 1 | BCCAAGUCCUACAGACUCCAACUUB | 38 |
| | (sense) + 2U overhang | | |
| 25810 | Sirna/RPI 21545 EGFR as siNA Str 2 | GCAAAAACCCUGUGAUUUCCUUU | 39 |
| | (antisense) + 2U overhang | | |
| 25811 | Sirna/RPI 21545 EGFR as siNA Str 1 | AGGAAAUCACAGGGUUUUUGCUU | 40 |
| | (sense) + 2U overhang | | |
| 25812 | Sirna/RPI 21543 EGFR as siNA Str 2 | UUGGUCAGUUUCUGGCAGUUCUU | 41 |
| | (antisense) + 2U overhang | | |
| 25830 | Sirna/RPI 21545 EGFR as siNA Str 2 | BGCAAAAACCCUGUGAUUUCCUUUB | 42 |
| | (antisense) + 2U overhang | | |
| 25831 | Sirna/RPI 21545 EGFR as siNA Str 1 | BAGGAAAUCACAGGGUUUUUGCUUB | 43 |
| | (sense) + 2U overhang | | |
| 25832 | Sirna/RPI 21543 EGFR as siNA Str 2 | BUUGGUCAGUUUCUGGCAGUUCUUB | 44 |
| | (antisense) + 2U overhang | | |
| 25813 | Sirna/RPI 21543 EGFR as siNA Str 1 | GAACUGCCAGAAACUGACCAAUU | 45 |
| | (sense) + 2U overhang | | |
| 25814 | HCV IRES Loop IIIb (Heptazyme site) as | GGUCCUUUCUUGGAUCAACCCUU | 46 |
| | siNA str1 (sense) + 2U overhang | | |
| 25815 | HCV IRES Loop IIIb (Heptazyme site) as | GGGUUGAUCCAAGAAAGGACCUU | 47 |
| | siNA str2 (antisense) + 2U overhang | | |
| 25833 | Sirna/RPI 21543 EGFR as siNA Str 1 | BGAACUGCCAGAAACUGACCAAUUB | 48 |
| | (sense) + 2U overhang | | |
| 25834 | HCV IRES Loop IIIb (Heptazyme site) as | BGGUCCUUUCUUGGAUCAACCCUUB | 49 |
| | siNA str1 (sense) + 2U overhang | | |
| 25835 | HCV IRES Loop IIIb (Heptazyme site) as | BGGGUUGAUCCAAGAAAGGACCUUB | 50 |
| | siNA str2 (antisense) + 2U overhang | | |
| 25816 | HBV (HepBzyme site) as siNA str1 | UGGACUUCUCUCAAUUUUCUAUU | 51 |
| | (sense) + 2U overhang | | |
| 25817 | HBV (HepBzyme site) as siNA str2 | UAGAAAAUUGAGAGAAGUCCAUU | 52 |
| | (antisense) + 2U overhang | | |
| 25818 | HBV18371 site as siNA str1 (sense) + | UUUUUCACCUCUGCCUAAUCAUU | 53 |
| | 2U overhang | | |
| 25836 | HBV (HepBzyme site) as siNA str1 | BUGGACUUCUCUCAAUUUUCUAUUB | 54 |
| | (sense) + 2U overhang | | |
| 25837 | HBV (HepBzyme site) as siNA str2 | BUAGAAAAUUGAGAGAAGUCCAUUB | 55 |
| | (antisense) + 2U overhang | | |
| 25838 | HBV18371 site as siNA str1 (sense) + | BUUUUUCACCUCUGCCUAAUCAUUB | 56 |
| | 2U overhang | | |
| 25819 | HBV18371 site as siNA str2 | UGAUUAGGCAGAGGUGAAAAAUU | 57 |
| | (antisense) + 2U overhang | | |
| 25820 | HBV16372-18373 site as siNA str1 | CAAGCCUCCAAGCUGUGCCUUUU | 58 |
| | (sense) + 2U overhang | | |
| 25821 | HBV16372-18373 site as siNA str 2 | AAGGCACAGCUUGGAGGCUUGUU | 59 |
| | (antisense) + 2U overhang | | |
| 25839 | HBV18371 site as siNA str2 | BUGAUUAGGCAGAGGUGAAAAAUUB | 60 |
| | (antisense) + 2U overhang | | |
| 25840 | HBV16372-18373 site as siNA str1 | BCAAGCCUCCAAGCUGUGCCUUUUB | 61 |
| | (sense) + 2U overhang | | |
| 25841 | HBV16372-18373 site as siNA str 2 | BAAGGCACAGCUUGGAGGCUUGUUB | 62 |
| | (antisense) + 2U overhang | | |
| 25822 | Sirna/RPI 17763 Her2Neu AS as siNA | UCCAUGGUGCUCACUGCGGCUUU | 63 |
| | Str 2 (antisense) + 2U overhang | | |
| 25823 | Sirna/RPI 17763 Her2Neu AS as siNA | AGCCGCAGUGAGCACCAUGGAUU | 64 |
| | Str 1 (sense) + 2U overhang | | |
| 25842 | Sirna/RPI 17763 Her2Neu AS as siNA | BUCCAUGGUGCUCACUGCGGCUUUB | 65 |
| | Str 2 (antisense) + 2U overhang | | |
| 25843 | Sirna/RPI 17763 Her2Neu AS as siNA | BAGCCGCAGUGAGCACCAUGGAUUB | 66 |
| | Str 1 (sense) + 2U overhang | | |
| 27649 | Sirna/RPI GL2 Str1 (sense) | CGUACGCGGAAUACUUCGA TT | 67 |
| 27650 | Sirna/RPI GL2 Str 2 (antisense) | UCGAAGUAUUCCGCGUACG TT | 68 |
| 27651 | Sirna/RPI Inverted GL2 Str1 (sense) | AGCUUCAUAAGGCGCAUGC TT | 69 |
| 27652 | Sirna/RPI Inverted GL2 Str2 (antisense) | GCAUGCGCCUUAUGAAGCU TT | 70 |
| 27653 | Sirna/RPI GL2 Str1 (sense) all ribo | CsGsUsAsCsGsCsGsGsAsAsUsAsCsUsUsCsGsA TT | 71 |
| | P = S | | |
| 27654 | Sirna/RPI GL2 Str1 (sense) all ribo | CsGUsACsGCsGGAAUsACsUsUsCsGA TT | 72 |
| | pyrimidines P = S | | |
| 27655 | Sirna/RPI GL2 Str1 (sense) 14 5′ | CsGsUsAsCsGsCsGsGsAsAsUsAsCsUUCGA TT | 73 |
| | P = S | | |
| 27656 | Sirna/RPI GL2 Str1 (sense) 10 5′ | CsGsUsAsCsGsCsGsGsASAUACUUCGA TT | 74 |
| | P = S | | |
| 27657 | Sirna/RPI GL2 Str1 (sense) 5 5′ | CsGsUSAsCsGCGGAAUACUUCGA TT | 75 |
| | P = S | | |
| 27658 | Sirna/RPI GL2 Str2 (antisense) all | UsCsGsAsAsGsUsAsUsUsCsCsGsCsGsUsAsCsG TT | 76 |
| | ribo P = S | | |
| 27659 | Sirna/RPI GL2 Str2 (antisense) all | UsCsGAAGUsAUsUsCsCsGCsGUsACsG TT | 77 |
| | ribo pyrimidines P = S | | |
| 27660 | Sirna/RPI GL2 Str 2 antisense 5′ 14 | UsCsGsAsAsGUsAsUsUsCsCsGsCsGUACG TT | 78 |
| | P = S | | |
| 27661 | Sirna/RPI GL2 Str2 (antisense) 5′ | UsCsGsAsAsGsUsAsUsUsCCGCGUACG TT | 79 |
| | 10 P = S | | |
| 27662 | Sirna/RPI GL2 Str2 (antisense) 5′ | UsCsGsAsAsGUAUUCCGCGUACG TT | 80 |
| | 5 P = S | | |
| 28010 | Sirna/RPI GL2 Str1 (sense) 5′ ligation | CGUACG | 81 |
| | fragment | | |
| 28011 | Sirna/RPI GL2 Str1 (sense) 3′ ligation | CGGAAUACUUCGATT | 82 |
| | fragment | | |
| 28012 | Sirna/RPI GL2 Str2 (antisense) 5′ | UCGAAGUA | 83 |
| | ligation fragment | | |
| 28013 | Sirna/RPI GL2 Str2 (antisense) 3′ | UUCCGCGUACGTT | 84 |
| | ligation fragment | | |
| 28254 | Sirna/RPI GL2 Str1 (sense) all | CsGUsACsGCsGGAAUsACsUsUSCcGATsT | 85 |
| | pyrimidines + TT = PS | | |
| 28255 | Sirna/RPI GL2 Str2 (antisense), + | UCGAAGUAUUCCGCGUACGTsT | 86 |
| | TT = PS | | |
| 28256 | Sirna/RPI GL2 Str2 (antisense), all | UsCsGAAGUsAUsUsCsCsGCsGUsACsGTsT | 87 |
| | pyrmidines = TT = PS | | |
| 28262 | Her2.1.sense Str1 (sense) | UGGGGUCGUCAAAGACGUUU | 88 |
| 28263 | Her2.1.antisense Str2 (antisense) | AACGUCUUUGACGACCCCATT | 89 |
| 28264 | Her2.1.sense Str1 (sense) inverted | UUGCAGAAACUGCUGGGGUTT | 90 |
| 28265 | Her2.1.antisense Str2 (antisense) | ACCCCAGCAGUUUCUGCAATT | 91 |
| | inverted | | |
| 28266 | Her2.2.sense Str1 (sense) | GGUGCUUGGAUCUGGCGCUTT | 92 |
| 28267 | Her2.2.antisense Str2 (antisense) | AGCGCCAGAUCCAAGCACCTT | 93 |
| 28268 | Her2.2.sense Str1 (sense) inverted | UCGCGGUCUAGGUUCGUGGTT | 94 |
| 28269 | Her2.2.antisense Str2 (antisense) | CCACGAACCUAGACCGCGATT | 95 |
| | inverted | | |
| 28270 | Her2.3.sense Str1 (sense) | GAUCUUUGGGAGCCUGGCATT | 96 |
| 28271 | Her2.3.antisense Str2 (antisense) | UGCCAGGCUCCCAAAGAUCTT | 97 |
| 28272 | Her2.3.sense Str1 (sense) inverted | ACGGUCCGAGGGUUUCUAGTT | 98 |
| 28273 | Her2.3.antisense Str 2 (antisense) | CUAGAAACCCUCGGACCGUTT | 99 |
| | inverted | | |
| 28274 | Sirna/RPI Inverted GL2 Str1 (sense) all | AGCsUsUsCsAUsAAGGCsGCsAUsGC TT | 100 |
| | ribo pyrimidines P = S | | |
| 28275 | Sirna/RPI Inverted GL2 Str1 (sense) | AsGsCsUsUsCAUAAGGCGCAUGC TT | 101 |
| | 5 5′ P = S | | |
| 28276 | Sirna/RPI Inverted GL2 Str2 (antisense) | GCsAUsGCsGCsCsUsUsAUsGAAGCsU TT | 102 |
| | all ribo pyrimidines P = S | | |
| 28277 | Sirna/RPI Inverted GL2 Str2 (antisense) | GsCsAsUsGsCGCCUUAUGAAGCU TT | 103 |
| | 5 5′ P = S | | |
| 28278 | Sirna/RPI Inverted GL2 Str2 (antisense) | GsCsAsUsGsCsGsCsCsUsUsAsusGsAsAsGscsu TT | 104 |
| | all ribo P = S | | |
| 28279 | Sirna/RPI Inverted GL2 Str2 (antisense) | GsCsAsUsGsCsGsCsCsUsUsAsUsGsAAGCU TT | 105 |
| | 14 5′ P = S | | |
| 28280 | Sirna/RPI Inverted GL2 Str2 (antisense) | GsCsAsUsGsCsGsCsCsUsUAUGAAGCU TT | 106 |
| | 10 5′ P = S | | |
| 28383 | hRelA.1.sense Str1 (sense) | CAGCACAGACCCAGCUGUGTT | 107 |
| 28384 | hRelA.1.antisense Str2 (antisense) | CACAGCUGGGUCUGUGCUGTT | 108 |
| 28385 | hRelA.1.sense Str1 (sense) inverted | GUGUCGACCCAGACACGACTT | 109 |
| 28386 | hRelA.1.antisense Str2 (antisense) | GUCGUGUCUGGGUCGACACTT | 110 |
| | inverted | | |
| 28387 | hRelA.2.sense Str1 (sense) | GCAGGCUGGAGGUAAGGCCTT | 111 |
| 28388 | hRelA.2.antisense Str2 (antisense) | GGCCUUACCUCCAGCCUGCTT | 112 |
| 28389 | hRelA.2.sense Str1 (sense) inverted | CCGGAAUGGAGGUCGGACGTT | 113 |
| 28390 | hRelA.2.antisense Str2 antisense | CGUCCGACCUCCAUUCCGGTT | 114 |
| | inverted | | |
| 28391 | h/mRelA.3.sense Str1 (sense) | GACUUCUCCUCCAUUGCGGTT | 115 |
| 28392 | h/mRelA.3.antisense Str2 (antisense) | CCGCAAUGGAGGAGAAGUCTT | 116 |
| 28393 | h/mRelA.3.sense Str1 (sense) inverted | GGCGUUACCUCCUCUUCAGTT | 117 |
| 28394 | h/mRelA.3.antisense Str2 (antisense) | CUGAAGAGGAGGUAACGCCTT | 118 |
| | inverted | | |
| 28395 | h/mRelA.4.sense Str1 (sense) | CACUGCCGAGCUCAAGAUCTT | 119 |
| 28396 | h/mRelA.4.antisense Str2 (antisense) | GAUCUUGAGCUCGGCAGUGTT | 120 |
| 28397 | h/mRelA.4.sense Str1 (sense) inverted | CUAGAACUCGAGCCGUCACTT | 121 |
| 28398 | h/mRelA.4.antisense Str2 (antisense) | GUGACGGCUCGAGUUCUAGTT | 122 |
| | inverted | | |
| 28399 | hlKKg.1.sense Str1 (sense) | GGAGUUCCUCAUGUGCAAGTT | 123 |
| 28400 | hlKKg.1.antisense Str2 (antisense) | CUUGCACAUGAGGAACUCCTT | 124 |
| 28401 | hlKKg.1.sense Str1 (sense) inverted | GAACGUGUACUCCUUGAGGTT | 125 |
| 28402 | hlKKg.1.antisense Str2 (antisense) | CCUCAAGGAGUACACGUUCTT | 126 |
| | inverted | | |
| 28403 | hlKKg.2.sense Str1 (sense) | UCAAGAGCUCCGAGAUGCCTT | 127 |
| 28404 | hlKKg.2.antisense Str2 (antisense) | GGCAUCUCGGAGCUCUUGATT | 128 |
| 28405 | hlKKg.2.sense Str1 (sense) inverted | CCGUAGAGCCUCGAGAACUTT | 129 |
| 28406 | hlKKg.2.antisense Str2 (antisense) | AGUUCUCGAGGCUCUACGGTT | 130 |
| | inverted | | |
| 28407 | h/mlKKG.sense Str1 (sense) | GCAGAUGGCUGAGGACAAGTT | 131 |
| 28408 | h/mlKKG.3.antisense Str2 (antisense) | CUUGUCCUCAGCCAUCUGCTT | 132 |
| 28409 | h/mlKKG.3.sense Str1 (sense) inverted | GAACAGGAGUCGGUAGACGTT | 133 |
| 28410 | h/mlKKG.3.antisense Str2 (antisense) | CGUCUACCGACUCCUGUUCTT | 134 |
| | inverted | | |
| 28447 | Sirna/RPI construct as hairpin + | AACGUACGCGGAAUACUUCGAUUAAAAGUAAUCGAAGUAUUCCGCGUACGUU | 135 |
| | GAAA + AU blunt | | |
| 28448 | Sirna/RPI construct as hairpin + | CGUACGCGGAAUACUUCGAUUAAAAGUAAUCGAAGUAUUCCGCGUACGUU | 136 |
| | GAAA + AU 3′ overhang | | |
| 28449 | Sirna/RPI construct as hairpin + | AACGUACGCGGAAUACUUCGAUUAAAGAAUCGAAGUAUUCCGCGUACGUU | 137 |
| | GAAA blunt | | |
| 28450 | Sirna/RPI construct as hairpin + | CGUACGCGGAAUACUUCGAUUAAGAAUCGAAGUAUUCCGCGUACGUU | 138 |
| | GAAA 3′ overhang | | |
| 28451 | Sirna/RPI construct as hairpin + | CGUACGCGGAAUACUUCGAUUGUUAAUCGAAGUAUUCCGCGUACGUU | 139 |
| | UUG 3′ overhang | | |
| 28452 | Sirna/RPI construct as hairpin + | AACGUACGCGGAAUACUUCGAUUGUUAAUCGAAGUAUUCCGCGUACGUU | 140 |
| | UUG | | |
| 28453 | Sirna/RPI construct as hairpin + | AACGUACGCGGAAUACUUCGAUUAGUUUAAUCGAAGUAUUCCGCGUACGUU | 141 |
| | UUG + AU blunt | | |
| 28454 | Sirna/RPI construct as hairpin + | CGUACGCGGAAUACUUCGAUUAGUUUAAUCGAAGUAUUCCGCGUACGUU | 142 |
| | UGG 3′ overhang | | |
| 28415 | HCV-Luc:325U21 TT siNA (sense) | CCCCGGGAGGUCUCGUAGATT | 143 |
| 28416 | HCV-Luc:162U21 TT siNA (sense) | CGGAACCGGUGAGUACACCU | 144 |
| 28417 | HCV-Luc:324U21 TT siNA (sense) | GCCCCGGGAGGUCUCGUAGTT | 145 |
| 28418 | HCV-Luc:163U21 TT siNA (sense) | GGAACCGGUGAGUACACCGTT | 146 |
| 28419 | HCV-Luc:294U21 TT siNA (sense) | GUGGUACUGCCUGAUAGGGTT | 147 |
| 28420 | HCV-Luc:293U21 TT siNA (sense) | UGUGGUACUGCCUGAUAGGTT | 148 |
| 28421 | HCV-Luc:292U21 TT siNA (sense) | UUGUGGUACUGCCUGAUAGTT | 149 |
| 28422 | HCV-Luc:343L21 TT siNA (325C) | UCUACGAGACCUCCCGGGGTT | 150 |
| | (antisense) | | |
| 28423 | HCV-Luc:180L21 TT siNA (162C) | GGUGUACUCACCGGUUCCGTT | 151 |
| | (antisense) | | |
| 28424 | HCV-Luc:342L21 TT siNA (324C) | CUACGAGACCUCCCGGGGCTT | 152 |
| | (antisense) | | |
| 28425 | HCV-Luc:181L21 TT siNA (163C) | CGGUGUACUCACCGGUUCCTT | 153 |
| | (antisense) | | |
| 28426 | HCV-Luc:312L21 TT siNA (294C) | CCCUAUCAGGCAGUACCACTT | 154 |
| | (antisense) | | |
| 28427 | HCV-Luc:311L21 TT siNA (293C) | CCUAUCAGGCAGUACCACATT | 155 |
| | (antisense) | | |
| 28428 | HCV-Luc:310L21 TT siNA (292C) | CUAUCAGGCAGUACCACAATT | 156 |
| | (antisense) | | |
| 28429 | HCV-Luc:325U21 TT siNA (sense) inv | TTAGAUGCUCUGGAGGGCCCC | 157 |
| 28430 | HCV-Luc:162U21 TT siNA (sense) inv | TTCCACAUGAGUGGCCAAGGC | 158 |
| 28431 | HCV-Luc:324U21 TT siNA (sense) inv | TTGAUGCUCUGGAGGGCCCCG | 159 |
| 28432 | HCV-Luc:163U21 TT siNA (sense) inv | TTGCCACAUGAGUGGCCAAGG | 160 |
| 28433 | HCV-Luc:294U21 TT siNA (sense) inv | TTGGGAUAGUCCGUCAUGGUG | 161 |
| 28434 | HCV-Luc:293U21 TT siNA (sense) inv | TTGGAUAGUCCGUCAUGGUGU | 162 |
| 28435 | HCV-Luc:292U21 TT siNA (sense) inv | TTGAUAGUCCGUCAUGGUGUU | 163 |
| 28436 | HCV-Luc:343L21 TT siNA (325C) | TTGGGGCCCUCCAGAGCAUCU | 164 |
| | (antisense) inv | | |
| 28437 | HCV-Luc:180L21 TT siNA (162C) | TTGCCUUGGCCACUCAUGUGG | 165 |
| | (antisense) inv | | |
| 28438 | HCV-Luc:342L21 TT siNA (324C) | TTCGGGGCCCUCCAGAGCAUC | 166 |
| | (antisense) inv | | |
| 28439 | HCV-Luc:181L21 TT siNA (163C) | TTCCUUGGCCACUCAUGUGGC | 167 |
| | (antisense) inv | | |
| 28440 | HCV-Luc:312L21 TT siNA (294C) | TTCACCAUGACGGACUAUCCC | 168 |
| | (antisense) inv | | |
| 28441 | HCV-Luc:311L21 TT siNA (293C) | TTACACCAUGACGGACUAUCC | 169 |
| | (antisense) inv | | |
| 28442 | HCV-Luc:310L21 TT siNA (292C) | TTAACACCAUGACGGACUAUC | 170 |
| | (antisense) inv | | |
| 28458 | Sirna/RPI Inverted GL2 Str1 (sense) | AsGsCsUsUsCAUAAGGCGCAUGC TsT | 171 |
| | 5 5′ P = S + TsT | | |
| 28459 | Sirna/RPI Inverted GL2 Str2 (antisense) | GsCsAsUsGsCGCCUUAUGAAGCU TsT | 172 |
| | 5 5′ PS + TsT | | |
| 28460 | Sirna/RPI GL2 Str1 (sense) | CsGsUsAsCsGCGGAAUACUUCGA TsT | 173 |
| | 5 5′ P = S + TsT | | |
| 28461 | Sirna/RPI GL2 Str2 (antisense) | UsCsGsAsAsGUAUUCCGCGUACG TsT | 174 |
| | 5 5′ P = S + TsT | | |
| 28511 | Sirna/RPI GL2 Str2 (antisense) + | CGUACGCGGAAUACUUCGAUBUCGAAGUAUUCCGCGUACG TT | 175 |
| | Sirna/RPI GL2 Str1 (sense) (tandem | | |
| | synth. w/idB on 3′ of Str 1) | | |
| 29543 | HBV:248U21 siNA pos (sense) | GUCUAGACUCGUGGUGGACTT | 176 |
| 29544 | HBV:414U21 siNA pos (sense) | CCUGCUGCUAUGCCUCAUCTT | 177 |
| 29545 | HBV:1867U21 siNA pos (sense) | CAAGCCUCCAAGCUGUGCCTT | 178 |
| 29546 | HBV:1877U21 siNA pos (sense) | AGCUGUGCCUUGGGUGGCUTT | 179 |
| 29547 | HBV:228L21 siNA neg (248C) (antisense) | GUCCACCACGAGUCUAGACTT | 180 |
| 29548 | HBV:394L21 siNA neg (414C) (antisense) | GAUGAGGCAUAGCAGCAGGTT | 181 |
| 29549 | HBV:1847L21 siNA neg (1867C) | GGCACAGCUUGGAGGCUUGTT | 182 |
| | (antisense) | | |
| 29550 | HBV:1857L21 siNA neg (1877C) | AGCCACCCAAGGCACAGCUTT | 183 |
| | (antisense) | | |
| 29551 | HBV:248U21 siNA pos (sense) inv | CAGGUGGUGCUCAGAUCUGTT | 184 |
| 29552 | HBV:414U21 siNA pos (sense) inv | CUACUCCGUAUCGUCGUCCTT | 185 |
| 29553 | HBV:1867U21 siNA pos (sense) inv | CCGUGUCGAACCUCCGAACTT | 186 |
| 29554 | HBV:1877U21 siNA pos (sense) inv | UCGGUGGGUUCCGUGUCGATT | 187 |
| 29555 | HBV:228L21 siNA neg (248C) (antisense) | CAGAUCUGAGCACCACCUGTT | 188 |
| | inv | | |
| 29556 | HBV:394L21 siNA neg (414C) (antisense) | GGACGACGAUACGGAGUAGTT | 189 |
| | inv | | |
| 29557 | HBV:1847L21 siNA neg (1867C) | GUUCGGAGGUUCGACACGGTT | 190 |
| | (antisense) inv | | |
| 29558 | HBV:1857L21 siNA neg (1877C) | UCGACACGGAACCCACCGATT | 191 |
| | (antisense) inv | | |
| 29573 | HCV-Luc:162U21 siNA (sense) | CGGAACCGGUGAGUACACCGG | 192 |
| 29574 | HCV-Luc:163U21 siNA (sense) | GGAACCGGUGAGUACACCGGA | 193 |
| 29575 | HCV-Luc:292U21 siNA (sense) | UUGUGGUACUGCCUGAUAGGG | 194 |
| 29576 | HCV-Luc:293U21 siNA (sense) | UGUGGUACUGCCUGAUAGGGU | 195 |
| 29577 | HCV-Luc:294U21 siNA (sense) | GUGGUACUGCCUGAUAGGGUG | 196 |
| 29578 | HCV-Luc:324U21 siNA (sense) | GCCCCGGGAGGUCUCGUAGAC | 197 |
| 29579 | HCV-Luc:325U21 siNA (sense) | CCCCGGGAGGUCUCGUAGACC | 198 |
| 29580 | HCV-Luc:182L21 siNA (162C) (antisense) | GGUGUACUCACCGGUUCCGCA | 199 |
| 29581 | HCV-Luc:183L21 siNA (163C) (antisense) | CGGUGUACUCACCGGUUCCGC | 200 |
| 29582 | HCV-Luc:312L21 siNA (292C) (antisense) | CUAUCAGGCAGUACCACAAGG | 201 |
| 29583 | HCV-Luc:313L21 siNA (293C) (antisense) | CCUAUCAGGCAGUACCACAAG | 202 |
| 29584 | HCV-Luc:314L21 siNA (294C) (antisense) | CCCUAUCAGGCAGUACCACAA | 203 |
| 29585 | HCV-Luc:344L21 siNA (324C) (antisense) | CUACGAGACCUCCCGGGGCAC | 204 |
| 29586 | HCV-Luc:345L21 siNA (325C) (antisense) | UCUACGAGACCUCCCGGGGCA | 205 |
| 29587 | HCV-Luc:162U21 siNA (sense) rev | GGCCACAUGAGUGGCCAAGGC | 206 |
| 29588 | HCV-Luc:163U21 siNA (sense) rev | AGGCCACAUGAGUGGCCAAGG | 207 |
| 29589 | HCV-Luc:292U21 siNA (sense) rev | GGGAUAGUCCGUCAUGGUGUU | 208 |
| 29590 | HCV-Luc:293U21 siNA (sense) rev | UGGGAUAGUCCGUCAUGGUGU | 209 |
| 29591 | HCV-Luc:294U21 siNA (sense) rev | GUGGGAUAGUCCGUCAUGGUG | 210 |
| 29592 | HCV-Luc:324U21 siNA (sense) rev | CAGAUGCUCUGGAGGGCCCCG | 211 |
| 29593 | HCV-Luc:325U21 siNA (sense) rev | CCAGAUGCUCUGGAGGGCCCC | 212 |
| 29594 | HCV-Luc:182L21 siNA (162C) (antisense) | ACGCCUUGGCCACUCAUGUGG | 213 |
| | rev | | |
| 29595 | HCV-Luc:183L21 siNA (163C) (antisense) | CGCCUUGGCCACUCAUGUGGC | 214 |
| | rev | | |
| 29596 | HCV-Luc:312L21 siNA (292C) (antisense) | GGAACACCAUGACGGACUAUC | 215 |
| | rev | | |
| 29597 | HCV-Luc:313L21 siNA (293C) (antisense) | GAACACCAUGACGGACUAUCC | 216 |
| | rev | | |
| 29598 | HCV-Luc:314L21 siNA (294C) (antisense) | AACACCAUGACGGACUAUCCC | 217 |
| | rev | | |
| 29599 | HCV-Luc:344L21 siNA (324C) (antisense) | CACGGGGCCCUCCAGAGCAUC | 218 |
| | rev | | |
| 29600 | HCV-Luc:345L21 siNA (325C) (antisense) | ACGGGGCCCUCCAGAGCAUCU | 219 |
| | rev | | |
| 29601 | Luc2:128U21 siNA (sense) | CAGAUGCACAUAUCGAGGUGA | 220 |
| 29602 | Luc3:128U21 siNA (sense) | CAGAUGCACAUAUCGAGGUGG | 221 |
| 29603 | Luc2/3:128U21 TT siNA (sense) | CAGAUGCACAUAUCGAGGUTT | 222 |
| 29604 | Luc2/3:148L21 siNA (128C) (antisense) | ACCUCGAUAUGUGCAUCUGUA | 223 |
| 29605 | Luc2/3:148L21 TT siNA (128C) | ACCUCGAUAUGUGCAUCUGTT | 224 |
| | (antisense) | | |
| 29606 | Luc2/3:166U21 siNA (sense) | UACUUCGAAAUGUCCGUUCGG | 225 |
| 29607 | Luc2/3:166U21 TT siNA (sense) | UACUUCGAAAUGUCCGUUCTT | 226 |
| 29608 | Luc2:186L21 siNA (166C) (antisense) | GAACGGACAUUUCGAAGUAUU | 227 |
| 29609 | Luc3:186L21 siNA (166C) (antisense) | GAACGGACAUUUCGAAGUACU | 228 |
| 29610 | Luc2/3:186L21 TT siNA (166C) | GAACGGACAUUUCGAAGUATT | 229 |
| | (antisense) | | |
| 29611 | Luc2/3:167U21 siNA (sense) | ACUUCGAAAUGUCCGUUCGGU | 230 |
| 29612 | Luc2/3:167U21 TT siNA (sense) | ACUUCGAAAUGUCCGUUCGTT | 231 |
| 29613 | Luc2:187L21 siNA (167C) (antisense) | CGAACGGACAUUUCGAAGUAU | 232 |
| 29614 | Luc3:187L21 siNA (167C) (antisense) | CGAACGGACAUUUCGAAGUAC | 233 |
| 29615 | Luc2/3:187L21 TT siNA (167C) | CGAACGGACAUUUCGAAGUTT | 234 |
| | (antisense) | | |
| 29616 | Luc2/3:652U21 siNA (sense) | AGAUUCUCGCAUGCCAGAGAU | 235 |
| 29617 | Luc2/3:652U21 TT siNA (sense) | AGAUUCUCGCAUGCCAGAGTT | 236 |
| 29618 | Luc2:672L21 siNA (652C) (antisense) | CUCUGGCAUGCGAGAAUCUGA | 237 |
| 29619 | Luc3:672L21 siNA (652C) (antisense) | CUCUGGCAUGCGAGAAUCUCA | 238 |
| 29620 | Luc2/3:672L21 TT siNA (652C) (antisense) | CUCUGGCAUGCGAGAAUCUTT | 239 |
| 29621 | Luc2/3:653U21 siNA (sense) | GAUUCUCGCAUGCCAGAGAUC | 240 |
| 29622 | Luc2/3:653U21 TT siNA (sense) | GAUUCUCGCAUGCCAGAGATT | 241 |
| 29623 | Luc2:673L21 siNA (653C) (antisense) | UCUCUGGCAUGCGAGAAUCUG | 242 |
| 29624 | Luc3:673L21 siNA (653C) (antisense) | UCUCUGGCAUGCGAGAAUCUC | 243 |
| 29625 | Luc2/3:673L21 TT siNA (653C) | UCUCUGGCAUGCGAGAAUCTT | 244 |
| | (antisense) | | |
| 29626 | Luc2/3:880U21 siNA (sense) | UUCUUCGCCAAAAGCACUCUG | 245 |
| 29627 | Luc2/3:880U21 TT siNA (sense) | UUCUUCGCCAAAAGCACUCTT | 246 |
| 29628 | Luc2:900L21 siNA (880C) (antisense) | GAGUGCUUUUGGCGAAGAAUG | 247 |
| 29629 | Luc3:900L21 siNA (880C) (antisense) | GAGUGCUUUUGGCGAAGAAGG | 248 |
| 29630 | Luc2/3:900L21 TT siNA (880C) | GAGUGCUUUUGGCGAAGAATT | 249 |
| | (antisense) | | |
| 29631 | Luc2/3:1012U21 siNA (sense) | CAAGGAUAUGGGCUCACUGAG | 250 |
| 29632 | Luc2/3:1012U21 TT siNA (sense) | CAAGGAUAUGGGCUCACUGU | 251 |
| 29633 | Luc2:1032L21 siNA (1012C) (antisense) | CAGUGAGCCCAUAUCCUUGUC | 252 |
| 29634 | Luc3:1032121 siNA (1012C) (antisense) | CAGUGAGCCCAUAUCCUUGCC | 253 |
| 29635 | Luc2/3:1032121 TT siNA (1012C) | CAGUGAGCCCAUAUCCUUGTT | 254 |
| | (antisense) | | |
| 29636 | Luc2:1139U21 siNA (sense) | AAACGCUGGGCGUUAAUCAGA | 255 |
| 29637 | Luc3:1139U21 siNA (sense) | AAACGCUGGGCGUUAAUCAAA | 256 |
| 29638 | Luc2/3:1139U21 TT siNA (sense) | AAACGCUGGGCGUUAAUCATT | 257 |
| 29639 | Luc2/3:1159L21 siNA (1139C) (antisense) | UGAUUAACGCCCAGCGUUUUC | 258 |
| 29540 | Luc2/3:1159121 TT siNA (1139C) | UGAUUAACGCCCAGCGUUUTT | 259 |
| | (antisense) | | |
| 29641 | Luc2:1283U21 siNA (sense) | AAGACGAACACUUCUUCAUAG | 260 |
| 29642 | Luc3:1283U21 siNA (sense) | AAGACGAACACUUCUUCAUCG | 261 |
| 29643 | Luc2/3:1283U21 TT siNA (sense) | AAGACGAACACUUCUUCAUTT | 262 |
| 29644 | Luc2/3:1303121 siNA 12830 (antisense) | AUGAAGAAGUGUUCGUCUUCG | 263 |
| 29645 | Luc2/3:1303121 TT siNA 12830 | AUGAAGAAGUGUUCGUCUUTT | 264 |
| | (antisense) | | |
| 29646 | Luc2:1487U21 siNA (sense) | AAGAGAUCGUGGAUUACGUGG | 265 |
| 29647 | Luc3:1487U21 siNA (sense) | AAGAGAUCGUGGAUUACGUCG | 266 |
| 29648 | Luc2/3:1487U21 TT siNA (sense) | AAGAGAUCGUGGAUUACGUTT | 267 |
| 29649 | Luc2/3:1507L21 siNA (1487C) (antisense) | ACGUAAUCCACGAUCUCUUUU | 268 |
| 29650 | Luc2/3:1507L21 TT siNA (1487C) | ACGUAAUCCACGAUCUCUUTT | 269 |
| | (antisense) | | |
| 29651 | Luc2:1622U21 siNA (sense) | AGGCCAAGAAGGGCGGAAAGU | 270 |
| 29652 | Luc3:1622U21 siNA (sense) | AGGCCAAGAAGGGCGGAAAGA | 271 |
| 29653 | Luc2/3:1622U21 TT siNA (sense) | AGGCCAAGAAGGGCGGAAATT | 272 |
| 29654 | Luc2/3:1642L21 siNA (1622C) (antisense) | UUUCCGCCCUUCUUGGCCUUU | 273 |
| 29655 | Luc2/3:1642L21 TT siNA (1622C) | UUUCCGCCCUUCUUGGCCUTT | 274 |
| | (antisense) | | |
| 29656 | Luc2:1623U21 siNA (sense) | GGCCAAGAAGGGCGGAAAGUC | 275 |
| 29657 | Luc3:1623U21 siNA (sense) | GGCCAAGAAGGGCGGAAAGAU | 276 |
| 29658 | Luc2/3:1623U21 TT siNA (sense) | GGCCAAGAAGGGCGGAAAGTT | 277 |
| 29659 | Luc2/3:1643L21 siNA (1623C) (antisense) | CUUUCCGCCCUUCUUGGCCUU | 278 |
| 29660 | Luc2/3:1643L21 TT siNA (1623C) | CUUUCCGCCCUUCUUGGCCTT | 279 |
| | (antisense) | | |
| 29663 | Sirna/RPI GL2 Str2 (antisense), all | UsCsGAAGUsAUsUsCsCsGCsGUsACsGUsT | 280 |
| | pyrimidines + 5 BrdUT = PS | | |
| 29664 | Sirna/RPI GL2 Str1 (sense) all | CsGUsACsGCsGGAAUsACsUsUsCsGAUsT | 281 |
| | pyrimidines + 5-BrdUT = PS | | |
| 29665 | Sirna/RPI GL2 Str1 (sense) | CsGsUsAsCsGCGGAAUACUUCGAUsT | 282 |
| | 5 5′ + 5-BrdUT = P = S | | |
| 29666 | Sirna/RPI GL2 Str2 (antisense) | UsCsGsAsAsGUAUUCCGCGUACGUsT | 283 |
| | 5 5′ + 5-BrdUT = P = S | | |
| 29667 | Sirna/RPI GL2 Str1 (sense) all | CsGUsACsGCsGGAAUsACsUsUsCsGATsTB | 284 |
| | pyrimidines + TT = PS + 3′ invAba | | |
| 29668 | Sirna/RPI GL2 Str1 (sense) all | BCsGUsACsGCsGGAAUsACsUsUsCsGATsTB | 285 |
| | pyrimidines = PS + 3′ and 5′ nvAba | | |
| 29669 | Sirna/RPI GL2 Str1 (sense) all | BCsGUsACsGCsGGAAUsACsUsUsCsGATsT | 286 |
| | pyrimidines + U = PS + 5′ invAba | | |
| 29670 | Sirna/RPI GL2 Str2 (antisense), all | UsCsGAAGUsAUsUsCsCsGCsGUsACsGTsTB | 287 |
| | pyrimidines + TT PS + 3′ invented | | |
| | abasic | | |
| 29671 | Sirna/RPI GL2 Str2 (antisense), all | BUsCsGAAGUsAUsUsCsCsGCsGUsACsGTsTB | 288 |
| | pyrimidines + TT PS + 3′ and 5′ | | |
| | inverted abasic | | |
| 29672 | Sirna/RPI GL2 Str2 (antisense), all | BUsCsGAAGUsAUsUsCsCsGCsGUsACsGTsT | 289 |
| | pyrimidines + TT PS + 5′ inverted | | |
| | abasic | | |
| 29678 | Sirna/RPI GL2 Str1 (sense) + Sirna/ | UCGAAGUAUUCCGCGUACG TTBCGUACGCGGAAUACUUCGATT | 290 |
| | RPI GL2 Str2 (antisense) (tandem synth. | | |
| | w/idB on 3′ of Str2) | | |
| 29681 | Sirna/RPI GL2 Str1 (sense) 5′ ligation | CsGsUsAsCsG | 291 |
| | fragment 5-5′-P = S | | |
| 29682 | Sirna/RPI GL2 Str1 (sense) 3′-ligation | CGGAAUACUUCGATsT | 292 |
| | fragment 5-5′-P = S | | |
| 29683 | Sirna/RPI GL2 Str2 (antisense) 5′ | UsCsGsAsAsGUA | 293 |
| | ligation fragment 5-5′-P = S | | |
| 29684 | Sirna/RPI GL2 Str2 (antisense) 3′ | UUCCGCGUACGTsT | 294 |
| | ligation fragment 5-5′-P = S | | |
| 29685 | Sirna/RPI GL2 Str2 (antisense) 5′ | UsCsGsAsAsGsUsA | 295 |
| | ligation fragment all-P = S | | |
| 29686 | Sirna/RPI GL2 Str2 (antisense) 3′ | UsUsCsCsGsCsGsUsAsCsGsTsT | 296 |
| | ligation fragment all-P = S | | |
| 29694 | FLT1:349U21 siNA stab1 (sense) | CsUsGsAsGsUUUAAAAGGCACCCTsT | 297 |
| 29695 | FLT1:2340U21 siNA stab1 (sense) | CsAsAsCsCsACAAAAUACAACAATsT | 298 |
| 29696 | FLT1:3912U21 siNA stab1 (sense) | CsCsUsGsGsAAAGAAUCAAAACCTsT | 299 |
| 29697 | FLT1:2949U21 siNA stab1 (sense) | GsCsAsAsGsGAGGGCCUCUGAUGTsT | 300 |
| 29698 | FLT1:369L21 siNA (349C) stab1 | GsGsGsUsGsCCUUUUAAACUCAGTsT | 301 |
| | (antisense) | | |
| 29699 | FLT1:2360L21 siNA (2340C) stab1 | UsUsGsUsUsGUAUUUUGUGGUUGTsT | 302 |
| | (antisense) | | |
| 29700 | FLT1:3932L21 siNA (3912C) stab1 | GsGsUsUsUsUGAUUCUUUCCAGGTsT | 303 |
| | (antisense) | | |
| 29701 | FLT1:2969L21 siNA (2949C) stab1 | CsAsUsCsAsGAGGCCCUCCUUGCTsT | 304 |
| | (antisense) | | |
| 29706 | FLT1:369L21 siNA (349C) (antisense) | GsGsGsUsGsCsCsUsUsUsUsAsAsAsCsUsCsAsGsTsT | 305 |
| | stab2 | | |
| 29707 | FLT1:236DL21 siNA (2340C) (antisense) | UsUsGsUsUsGsUsAsUsUsUsUsGsUsGsGsUsUsGsTsT | 306 |
| | stab2 | | |
| 29708 | FLT1:3932L21 siNA (3912C) (antisense) | GsGsUsUsUsUsGsAsUsUsCsUsUsUsCsCsAsGsGsTsT | 307 |
| | stab2 | | |
| 29709 | FLT1:2969121 siNA (2949C) (antisense) | CsAsUsCsAsGsAsGsGsCsCsCsUsCsCsUsUsGsCsTsT | 308 |
| | stab2 | | |
| 28030 | Sirna/RPI GL2 Str1 (sense) | ggcauuggccaacguacgcggaauacuucgauucgguuacgaa | 309 |
| 28242 | Sirna/RPI GL2 Str1 (sense) 2′-OMe | cguacgcggaauacuucgauu | 310 |
| 28243 | Sirna/RPI GL2 Str1 (sense) 14 5′ | cguacgcggaauacUUCGATT | 311 |
| | 2′-O-Me | | |
| 28244 | Sirna/RPI GL2 Str1 (sense) 10 5′ | cguacgcggaAUACUUCGATT | 312 |
| | 2′-O-Me | | |
| 28245 | Sirna/RPI GL2 Str1 (sense) 5 5′ 2′-O-Me | cguacGCGGAAUACUUCGATT | 313 |
| 28246 | Sirna/RPI GL2 Str2 (antisense) all | ucgaaguauuccgcguacguu | 314 |
| | 2′-O-me | | |
| 28247 | Sirna/RPI GL2 Str2 (antisense) all ribo | ucGAAGuAuuccGcGuAcGuu | 315 |
| | pyrimidines 2′-Ome | | |
| 28248 | Sirna/RPI GL2 Str2 (antisense) 5′ | ucgaaguauuccgcGUACGTT | 316 |
| | 14 2′-O-Me | | |
| 28249 | Sirna/RPI GL2 Str2 (antisense) 5′ | ucgaaguauuCCGCGUACGTT | 317 |
| | 10 2′-O-Me | | |
| 28250 | Sirna/RPI GL2 Str2 (antisense) 5′ | ucgaaGUAUUCCGCGUACGTT | 318 |
| | 2′-O-Me | | |
| 28251 | Sirna/RPI GL2 Str1 (sense) all | cGuAcGcGGAAuAcuucGATT | 319 |
| | pyrimidines 2′-O-Me except 3′-TT | | |
| 28252 | Sirna/RPI GL2 Str1 (sense) all | cGuAcGcGGAAuAcuucGAuu | 320 |
| | pyrimidines = 2′-OMe | | |
| 28253 | Sirna/RPI GL2 Str1 (sense) + TT = | CGUACGCGGAAUACUUCGATsT | 321 |
| | P = S | | |
| 28261 | Sirna/RPI GL2 Str2 (antisense) all ribo | ucGAAGuAuuccGcGuAcGTT | 322 |
| | pyrimidines = 2′-O-me, except 3′-TT | | |
| 28257 | Sirna/RPI GL2 Str1 (sense) + 3′ univ. | CGUACGCGGAAUACUUCGAXX | 323 |
| | base 2 | | |
| 28258 | Sirna/RPI GL2 Str1 (sense) + 3′ univ | CGUACGCGGAAUACUUCGAZZ | 324 |
| | base 1 | | |
| 28259 | Sirna/RPI GL2 Str2 (antisense), + | UCGAAGUAUUCCGCGUACGXX | 325 |
| | 3′ univ. base 2 | | |
| 28260 | Sirna/RPI GL2 Str2 (antisense), + | UCGAAGUAUUCCGCGUACGZZ | 326 |
| | 3′ univ. base 1 | | |
| 28014 | Sirna/RPI GL2 Str1 (sense) 5′ | csGsusAscG | 327 |
| | ligation fragment P = Scapped Y-2′ F | | |
| 28015 | Sirna/RPI GL2 Str1 (sense) 3′ ligation | cGGAAuAcuucsGsAstsT | 328 |
| | fragment P = Scapped Y-2′ F | | |
| 28026 | Sirna/RPI GL2 Str1 (sense) | csGsusAscGcGGAAuAcuucsGsAsTsT | 329 |
| | P = Scapped Y-2′ F | | |
| 28016 | Sirna/RPI GL2 Str2 (antisense) 5′ | uscsGsAsAGuA | 330 |
| | ligation fragment P = Scapped Y-2′ F | | |
| 28017 | Sirna/RPI GL2 Str2 (antisense) 3′ | uuccGCGuAscsGsTsT | 331 |
| | ligation fragment P = Scapped Y-2′ F | | |
| 28027 | Sirna/RPI GL2 Str2 (antisense) | uscsGsAsAGuAuuccGcGuAscsGsTsT | 332 |
| | P = Scapped Y-2′ F | | |
| 28018 | Sirna/RPI GL2 Str1 (sense) 5′ ligation | scGuAcG | 333 |
| | fragment 5′ P = S Y-2′ F | | |
| 28019 | Sirna/RPI GL2 Str1 (sense) 3′ ligation | cGGAAuAcuucGATT | 334 |
| | fragment 5′ P = S Y-2′ F | | |
| 28028 | Sirna/RPI GL2 Str1 (sense) | scGuAcGcGGAAuAcuucGATT | 335 |
| | 5′ P = S Y-2′ F | | |
| 28020 | Sirna/RPI GL2 Str2 (antisense) 5′ | sucGAAGuA | 336 |
| | ligation fragment 5′ P = S Y-2′ F | | |
| 28021 | Sirna/RPI GL2 Str2 (antisense) 3′ | uuCcGCGuAcGTT | 337 |
| | ligation fragment 5′ P = S Y-2′ F | | |
| 28029 | Sirna/RPI GL2 Str2 (antisense) | sucGAAGuAuuccGCGuAcGTT | 338 |
| | 5′ P = S Y-2′ F | | |
| 28022 | Sirna/RPI Inverted GL2 Str1 (sense) | AsGscsusucAuAAGGcGcAusGscsTsT | 339 |
| | P = Scapped Y-2′ F | | |
| 28023 | Sirna/RPI Inverted GL2 Str2 (antisense) | GscsAsusGcGccuuAuGAAGscsusTsT | 340 |
| | P = Scapped Y-2′ F | | |
| 28024 | Sirna/RPI Inverted GL2 Str1 (sense) | sAGcuucAuAAGGcGcAuGcTT | 341 |
| | 5′ P = S Y-2′ F | | |
| 28025 | Sirna/RPI Inverted GL2 Str2 (antisense) | sGcAuGcGccuuAuGAAGcuTT | 342 |
| | 5′ P = S Y-2′ F | | |
| 28455 | Sirna/RPI GL2 Str1 (sense) 2′-F U C | cGuAcGcGGAAuAcuucTGATT | 343 |
| 28456 | Sirna/RPI GL2 Str2 (antisense) 2′-F U C | ucGAAGuAuuccGcGuAcGTT | 344 |
| 29702 | FLT1:349U21 siNA stab3 (sense) | csusGsAsGuuuAAAAGGcAcscscsTsT | 345 |
| 29703 | FLT1:2340U21 siNA stab3 (sense) | csAsAscscAcAAAAuAcAAcsAsAsTsT | 346 |
| 29704 | FLT1:3912U21 siNA stab3 (sense) | cscsusGsGAAAGAAucAAAAscscsTsT | 347 |
| 29705 | FLT1:2949U21 siNA stab3 (sense) | GscsAsAsGGAGGGccucuGAsusGsTsT | 348 |
| 28443 | Sirna/RPI GL2 Str1 (sense) 2′-amino U C | cGuAcGcGGAAuAcuucGATT | 349 |
| 28444 | Sirna/RPl GL2 Str2 (antisense) 2′-amino | ucGAAGuAuuccGcGuAcGTT | 350 |
| | U C | | |
| 28445 | Sirna/RPI GL2 Str1 (sense) 2′-amino | cGuAcGcGGAAuAcuucGAuT | 351 |
| | U C uT 3′ end | | |
| 28446 | Sirna/RPI GL2 Str2 (antisense) 2′-amino | ucGAAGuAuucc+E GcGuAcGuT | 352 |
| | U C uT 3′ end | | |
| 30051 | HCV-Luc:325U21 siNA | BCsCsCsCsGsGGAGGUCUCGUAGAXXB | 353 |
| | 5 5′ P = S + 3′ univ. base | | |
| | 2 + 5′/3′ invAba (antisense) | | |
| 30052 | HCV-Luc:325U21 siNA rev 5 5′ P = S + | BAsGsAsUsGsCUCUGGAGGGCCCCXXB | 354 |
| | 3′ univ. base 2 + 5′/3′ invAba | | |
| | (antisense) | | |
| 30053 | HCV-Luc:345L21 siNA (325C) (antisense) | UsCsUsAsCsGAGACCUCCCGGGGXXB | 355 |
| | 5 5′ P = S + 3′ univ. base | | |
| | 2 + 3′ invAba (sense) | | |
| 30054 | HCV-Luc:345L21 siNA (325C) (antisense) | GsGsGsGsCsCCUCCAGAGCAUCUXXB | 356 |
| | rev 5 5′ P = S + 3′ univ. base | | |
| | 2 + 3′ invAba (sense) | | |
| 30055 | HCV-Luc:325U21 siNA all Y | BCsCsCsCsGGGAGGUsCsUsCsGUsAGAXXB | 357 |
| | P = S + 3′ univ. base 2 + 5′/3′ | | |
| | invAba (antisense) | | |
| 30056 | HCV-Luc:325U21 siNA rev all | BAGAUsGCsUsCsUsGGAGGGCsCsCsCsXXB | 358 |
| | Y P = S + 3′ univ. base | | |
| | 2 + 5′/3′ invAba (antisense) | | |
| 30057 | HCV-Luc:345L21 siNA (325C) (antisense) | UsCsUsACsGAGACsCsUsCsCsCsGGGGXXB | 359 |
| | all Y P = S + 3′ univ. base | | |
| | 2 + 3′ invAba (sense) | | |
| 30058 | HCV-Luc:345L21 siNA (325C) (antisense) | GGGGCsCsCsUsCsCsAGAGCsAUsCsUsXXB | 360 |
| | rev all Y P = S + 3′ univ. base | | |
| | 2 + 3′ invAba (sense) | | |
| 30059 | HCV-Luc:325U21 siNA 4/3 P = S ends + | BcscscscsGGGAGGucucGuAsGsAsXXB | 361 |
| | all Y-2′ F + 3′ univ. base | | |
| | 2 + 5′/3′ invAba (antisense) | | |
| 30060 | HCV-Luc:325U21 siNA rev 4/3 P = S | BAsGsAsusGcucuGGAGGGccscscsXXB | 362 |
| | ends + all Y-2′ F + 3′ univ. base | | |
| | 2 + 5′/3′ invAba (antisense) | | |
| 30170 | HCV-Luc:325U21 siNA all Y-2′ F + 3′ | B ccccGGGAGGucucGuAGAXX B | 363 |
| | univ. base 2 + 5′/3′ invAba | | |
| | (antisense) | | |
| 30171 | HCV-Luc:325U21 siNA rev all Y-2′ | B AGAuGcucuGGAGGGccccXX B | 364 |
| | F + 3′ univ. base 2 + 5′/3′ | | |
| | invAba (antisense) | | |
| 30172 | HCV-Luc:345L21 siNA (325C) (antisense) | B UsCsUsACsGAGACscsUsCsCsGGGGXX B | 365 |
| | all Y P = S + 3′ univ. base | | |
| | 2 + 5′/3′ invAba (antisense) | | |
| 30173 | HCV-Luc:345L21 siNA (325C) | ucuAcGAGAccucccGGGG | 366 |
| | (antisense) all Y-2′ F | | |
| 30174 | HCV-Luc:345L21 siNA (325C) (antisense) | GGGGcccuccAGAGcAucu | 367 |
| | rev all Y-2′ F | | |
| 30175 | HCV-Luc:345L21 siNA (325C) (antisense) | ucuAcGAGAccucccGGGGXX | 368 |
| | all Y-2′ F + 3′ univ. base 2 | | |
| 30176 | HCV-Luc:345L21 siNA (325C) (antisense) | GGGGcccuccAGAGcAucuXX | 369 |
| | rev all Y-2′ F + 3′ univ. base 2 | | |
| 30177 | HCV-Luc:345L21 siNA (325C) (antisense) | B ucuAcGAGAccucccGGGGXX B | 370 |
| | all Y-2′ F + 3′ univ. base | | |
| | 2 + 5′/3′ iB | | |
| 30178 | HCV-Luc:325U21 siNA all Y P = S + 3′ | CsCsCsCsGGGAGGUsCsUsCsGUsAXX B | 371 |
| | univ. base 2 + 3′ invAba (sense) | | |
| 30063 | Sirna/RPI GL2 Str1 (sense) 2′-F U, | BcGuAcGcGGAAuAcuucGATTB | 372 |
| | C + 3′, 5′ abasic | | |
| 30222 | Sirna/RPI GL2 Str1 (sense) Y 2′-O-Me | B cGuAcGcGGAAuAcuuGGATT B | 373 |
| | with 3′-TT & 5′/3′ iB | | |
| 30224 | Sirna/RPI GL2 Str2 (antisense) Y 2′-F | ucGAAGuAuuccGcGuAcGTsT | 374 |
| | & 3′ TsT | | |
| 30430 | Sirna/RPI GL2 Str2 (antisense) 2′-F U, | ucgaaguauuccgcguacgTsT | 375 |
| | C + 5′, 3′ abasic, A, G = 2′-O-Me | | |
| 30431 | Sirna/RPI GL2 Str1 (sense) 2′-F U, | BcguacgcggaauacuucgaTTB | 376 |
| | C + 3′, 5′ abasic, TT; 2′-O-Me-A, G | | |
| 30433 | Sirna/RPI GL2 Str1 (sense) 2′-F U, | BcGuAcGcGGAAuAcuucGATTB | 377 |
| | C + 3′, 5′ abasic, TT; 2′-deoxy-A, G | | |
| 30550 | Sirna/RPI GL2 Str2 (antisense) 2′-F U, | ucGAAGuAuuccGcGuAcGTst | 378 |
| | C 3′-dTsT | | |
| 30555 | Sirna/RPI GL2 Str2 (antisense) 2′-F U, | ucGAAGuAuuGcGcGuAcGTL | 379 |
| | C 3′-glycerol, T | | |
| 30556 | Sirna/RPI GL2 Str2 (antisense) 2′-F U, | ucGAAGuAuucGGcGuAcGTTL | 380 |
| | C 3′-glycerol, 2T | | |
| 30226 | rev Sirna/RPI GL2 Str1 (sense) | B AGcuucAuAAGGcGGAuGcuTT B | 381 |
| | Y 2′-O-Me with 3′-TT & 5′/3′ iB | | |
| 30227 | rev Sirna/RPI GL2 Str1 (sense) Y 2′-F | B AGcuucAuAAGGcGcAuGcuTT B | 382 |
| | with 3′-TT & 5′/3′ iB | | |
| 30229 | rev Sirna/RPI GL2 Str2 (antisense) | GcAuGcGccuuAuGAAGcuTsT | 383 |
| | Y 2′-F & 3′ TsT | | |
| 30434 | Sirna/RPI GL2 Str1 (sense) 2′-F U, | BcguacgcGGAAuAcuucgaTTB | 384 |
| | C + 3′, 5′ Abasic, TT; 2′-O-Me-A, G; | | |
| | ribo core | | |
| 30435 | Sirna/RPI GL2 Str1 (sense) 2′-F U, | BcGuAcGcGGAAuAcuucGATTB | 385 |
| | C + 3′, 5′ Abasic, TT; 2′-deoxy A, | | |
| | G; ribo core | | |
| 30546 | Sirna/RPI GL2 Str2 (antisense) 2′-F U, | ucGAAGuAuuccGcGuAcG3T | 386 |
| | C 3′-dTT | | |
| 30551 | Sirna/RPI GL2 Str2 (antisense) 2′-F U, | ucGAAGuAuuccGcGuAcGTddC | 387 |
| | C dTddC | | |
| 30557 | Sirna/RPI GL2 Str2 (antisense) 2′-F U, | ucGAAGuAuuccGcGuAcGT | 388 |
| | C 3′-inverted T, T | | |
| 30558 | Sirna/RPI GL2 Str2 (antisense) 2′-F U, | ucGAAGuAuuccGcGuAcGTT | 389 |
| | C 3′-inverted T, TT | | |
| 30196 | FLT1:2340U21 siRNA (sense) iB caps | B cAAGcAcAAAAuAcAAcAATT B | 390 |
| | w/2′ FY's | | |
| 30416 | FLT1:2358L21 siRNA (2340C) (antisense) | uuGuuGuAuuuuGuGGuuGTsT | 391 |
| | TsT | | |
| 30350 | HBV:262U21 siRNA stab04 (sense) | B uGGAcuucucucAAuuuucuA B | 392 |
| 30361 | HBV:280L21 siRNA (262C) (antisense) | GAAAAuuGAGAGAAGuccATsT | 393 |
| | stab05 | | |
| 30372 | HBV:262U21 siRNA inv stab04 (sense) | B AucuuuuAAcucucuucAGGu B | 394 |
| 30383 | HBV:280L21 siRNA (262C) (antisense) | AccuGAAGAGAGuuAAAAGTsT | 395 |
| | inv stab05 | | |
| 30352 | HBV:380U21 siRNA stab04 (sense) | B uGuGucuGcGGcGuuuuAucA B | 396 |
| 30363 | HBV:398L21 siRNA (380C) (antisense) | AuAAAAcGccGcAGAcAcATsT | 397 |
| | stab05 | | |
| 30374 | HBV:380U21 siRNA inv stab04 (sense) | B AcuAuuuuGcGGcGucuGuGu B | 398 |
| 30385 | HBV:398L21 siRNA (380C) (antisense) | AcAcAGAcGcGGcAAAAuATsT | 399 |
| | inv stab05 | | |
| 30353 | HBV:413U21 siRNA stab04 (sense) | B uccuGcuGcuAuGccucAucu B | 400 |
| 30364 | HBV:431L21 siRNA (413C) (antisense) | AuGAGGGAuAGcAGcAGGATsT | 401 |
| | stab05 | | |
| 30375 | HBV:413U21 siRNA inv stab04 (sense) | B ucuAcuccGuAucGucGuccu B | 402 |
| 30386 | HBV:431L21 siRNA 4130 (antisense) inv | AGGAcGAcGAuAcGGAGuATsT | 403 |
| | stab05 | | |
| 30354 | HBV:462U21 siRNA stab04 (sense) | B uAuGuuGcccGuuuGuccucu B | 404 |
| 30365 | HBV:480L21 siRNA 4620 (antisense) | AGGAGAAACGGGcAAcAuATsT | 405 |
| | stab05 | | |
| 30376 | HBV:462U21 siRNA inv stab04 (sense) | B ucuccuGuuuGGccGuuGuAu B | 406 |
| 30387 | HBV:480L21 siRNA (462C) (antisense) | AuAcAAcGGGcAAAcAGGATsT | 407 |
| | inv stab05 | | |
| 30355 | HBV:1580U21 siRNA stab04 (sense) | B uGuGcAcuucGcuucAccucu B | 408 |
| 30366 | HBV:1598L21 siRNA (1580C) (antisense) | AGGuGAAGcGAAGuGcAcATsT | 409 |
| | stab05 | | |
| 30377 | HBV:1580U21 siRNA inv stab04 (sense) | B ucuccAcuucGcuucAcGuGu B | 410 |
| 30388 | HBV:1598L21 siRNA (1580C) (antisense) | AcAcGuGAAGcGAAGuGGATsT | 411 |
| | inv stab05 | | |
| 30356 | HBV:1586U21 siRNA inv stab04 (sense) | B cuucGcuucAccucuGcAcGu B | 412 |
| 30367 | HBV:1604L21 siRNA (1586C) (antisense) | GuGcAGAGGuGAAGcGAAGTsT | 413 |
| | inv stab05 | | |
| 30378 | HBV:1586U21 siRNA inv stab04 (sense) | B uGcAcGucuccAcuucGcuuc B | 414 |
| 30389 | HBV:1604L21 siRNA (1586C) (antisense) | GAAGcGAAGuGGAGAcGuGTsT | 415 |
| | inv stab05 | | |
| 30357 | HBV:1780U21 siRNA stab04 (sense) | B AGGcuGuAGGcAuAAAuuGGu B | 416 |
| 30368 | HBV:1798L21 siRNA (1780C) (antisense) | cAAuuuAuGccuAcAGccuTsT | 417 |
| | inv stab05 | | |
| 30379 | HBV:1780U21 siRNA inv stab04 (sense) | B uGGuuAAAuAcGGAuGucGGA B | 418 |
| 30390 | HBV:1798L21 siRNA (1780C) (antisense) | uccGAcAuccGuAuuuAAcTsT | 419 |
| | inv stab05 | | |
| 30612 | HBV:1580U21 siRNA stab07 (sense) | B uGuGcAcuucGcuucAccuTT B | 420 |
| 30620 | HBV:1598L21 siRNA (1580C) (antisense) | aggugaagcgaagugcacaTsT | 421 |
| | stab08 | | |
| 30628 | HBV:1582U21 siRNA inv stab07 (sense) | B ucuccAcuucGcuucAcGuTT B | 422 |
| 30636 | HBV:1596L21 siRNA 15780 (antisense) inv | gcacacgugaagcgaagugTsT | 423 |
| | stab08 | | |
| 31175 | HBV:1598L21 siRNA (1580C) stab11 | AGGuGAAGcGAAGuGcAcATsT | 424 |
| | (antisense) | | |
| 31176 | HBV:1596L21 siRNA (1578C) antisense inv | GcAcAcGuGAAGcGAAGuGTsT | 425 |
| | stab11 (antisense) | | |
| 30287 | HBV:1580U21 siRNA (sense) | UGUGCACUUCGCUUCACCUCU | 426 |
| 30298 | HBV:1598L21 siRNA (1580C) (antisense) | AGGUGAAGCGAAGUGCACACG | 427 |
| 31335 | HBV:1580U21 siRNA stab09 (sense) | B UGUGCACUUCGCUUCACCUTT B | 428 |
| 31337 | HBV:1598L21 siRNA (1580C) stab10 | AGGUGAAGCGAAGUGCACATsT | 429 |
| | (antisense) | | |
| 31456 | HCVa:291U21 siRNA stab04 (sense) | B cuuGuGGuAcuGccuGAuATT B | 430 |
| 31468 | HCVa:309L21 siRNA (291C) stab05 | uAucAGGGAGuAccAcAAGTsT | 431 |
| | (antisense) | | |
| 31480 | HCVa:291U21 siRNA stab04 (sense) | B AuAGuccGucAuGGuGuucTT B | 432 |
| 31492 | HCVa:309L21 siRNA (291C) inv stab05 | GAAcAccAuGAcGGAcuAuTsT | 433 |
| | (antisense) | | |
| 31461 | HCVa:300U21 siRNA stab04 (sense) | B cuGccuGAuAGGGuGcuuGTT B | 434 |
| 31473 | HCVa:318L21 siRNA (300C) stab05 | cAAGcAcccuAucAGGcAGTsT | 435 |
| | (antisense) | | |
| 31485 | HCVa:300U21 siRNA stab04 (sense) | B GuucGuGGGAuAGuccGucTT B | 436 |
| 31497 | HCVa:318121 siRNA (300C) inv stab05 | GAcGGAcuAucccAcGAAcTsT | 437 |
| 31463 | HCVa:303U21 siRNA stab04 (sense) | B ccuGAuAGGGuGcuuGcGATT B | 438 |
| 31475 | HCVa:321L21 siRNA (303C) stab05 | ucGcAAGcAcccuAucAGGTsT | 439 |
| | (antisense) | | |
| 31487 | HCVa:303U21 siRNA inv stab04 (sense) | B AGcGuucGuGGGAuAGuccTT B | 440 |
| 31499 | HCVa:321L21 siRNA (303C) inv stab05 | GGAcuAucccAcGAAcGcuTsT | 441 |
| | (antisense) | | |
| 31344 | HCVa:325U21 siRNA stab07 (sense) | B ccccGGGAGGucucGuAGATT B | 442 |
| 30562 | HCVa:345L21 siRNA (325C) Y-2′ F, R-2′ | ucuAcGAGAccucccGGGGTsT | 443 |
| | OMe + TsT (antisense) | | |
| 31345 | HCVa:325U21 siRNA inv stab07 (sense) | B AGAuGcucuGGAGGGccccTT B | 444 |
| 31346 | HCVa:343L21 siRNA (325C) inv stab08 | GGGGcccuccAGAGcAucuTsT | 445 |
| | (antisense) | | |
| 31702 | HCVa:326U21 siRNA stab07 (sense) | B cccGGGAGGucucGuAGAGcTT B | 446 |
| 31706 | HCVa:344L21 siRNA (326C) stab08 | GucuAcGAGAccucccGGGTsT | 447 |
| | (antisense) | | |
| 31710 | HCVa:326L21 siRNA inv stab07 (sense) | B cAGAuGcucuGGAGGGcccTT B | 448 |
| 31714 | HCVa:344L21 siRNA (326C) inv stab08 | GGGcccuccAGAGcAucuGTsT | 449 |
| | (antisense) | | |
| 31703 | HCVa:327U21 siRNA stab07 (sense) | B ccGGGAGGucucGuAGAccTT B | 450 |
| 31707 | HCVa:345L21 siRNA (327C) stab08 | GGucuAcGAGAccucccGGTsT | 451 |
| | (antisense) | | |
| 31711 | HCVa:327U21 siRNA inv stab07 (sense) | B ccAGAuGGucuGGAGGGccTT B | 452 |
| 31715 | HCVa:345L21 siRNA (327C) inv stab08 | GGcccuccAGAGcAucuGGTsT | 453 |
| | (antisense) | | |
| 31704 | HCVa:328U21 siRNA stab07 sense | B cGGGAGGucucGuAGAccGTT B | 454 |
| 31708 | HCVa:346L21 siRNA (328C) stab08 | cGGucuAcGAGAccucccGTsT | 455 |
| | (antisense) | | |
| 31712 | HCVa:328U21 siRNA inv stab07 (sense) | B GccAGAuGcucuGGAGGGcu B | 456 |
| 31716 | HCVa:346L21 siRNA (328C) inv stab08 | GcccuccAGAGcAucuGGcTsT | 457 |
| | (antisense) | | |
| 31705 | HCVa:329U21 siRNA stab07 (sense) | B GGGAGGucucGuAGAccGuu B | 458 |
| 31709 | HCVa:347121 siRNA (329C) stab08 | AcGGucuAcGAGAccucccTsT | 459 |
| | (antisense) | | |
| 31713 | HCVa:329U21 siRNA inv stab07 (sense) | B uGccAGAuGcucuGGAGGGu B | 460 |
| 31717 | HCVa:347L21 siRNA (329C) inv stab08 | cccuccAGAGcAucuGGcATsT | 461 |
| | (antisense) | | |
| | HCVa:327 siRNA 3′-classl 10 bp | UCUCGUAGACCUUGGUCUACGAGACCUCCCGGTT | 462 |
| | HCVa:327 siRNA 3′-classl 8 bp | UCGUAGACCUUGGUCUACGAGACCUCCCGGTT | 463 |
| | HCVa:327 siRNA 3′-classl 6 bp | GUAGACCUUGGUCUACGAGACCUCCCGGTT | 464 |
| | HCVa:327 siRNA 3′-classl 4 bp | AGACCUUGGUCUACGAGACCUCCCGGTT | 465 |
| | HCVa:327 siRNA 5′-classl 10 bp | GGUCUACGAGACCUCCCGGUUCCGGGAGGUCU | 466 |
| | HCVa:327 siRNA 5′-classl 8 bp | GGUCUACGAGACCUCCCGGUUCCGGGAGGU | 467 |
| | HCVa:327 siRNA 5′-classl 6 bp | GGUCUACGAGACCUCCCGGUUCCGGGAG | 468 |
| | HCVa:327 siRNA 5′-classl 4 bp | GGUCUACGAGACCUCCCGGUUCCGGG | 469 |
| | HCVa:327 siRNA 3′-gaaa 10 bp | CUCGUAGACCGAAAGGUCUACGAGACCUCCCGGTT | 470 |
| | HCVa:327 siRNA 3′-gaaa 8 bp | CGUAGACCGAAAGGUCUACGAGACCUCCCGGTT | 471 |
| | HCVa:327 siRNA 3′-gaaa 6 bp | UAGACCGAAAGGUCUACGAGACCUCCCGGTT | 472 |
| | HCVa:327 siRNA 3′-gaaa 4 bp | GACCGAAAGGUCUACGAGACCUCCCGGTT | 473 |
| | HCVa:327 siRNA 5′-gaaa 10 bp | GGUCUACGAGACCUCCCGGUUGAAACCGGGAGGUC | 474 |
| | HCVa:327 siRNA 5′-gaaa 8 bp | GGUCUACGAGACCUCCCGGUUGAAACCGGGAGG | 475 |
| | HCVa:327 siRNA 5′-gaaa 6 bp | GGUCUACGAGACCUCCCGGUUGAAACCGGGA | 476 |
| | HCVa:327 siRNA 5′-gaaa 4 bp | GGUCUACGAGACCUCCCGGUUGAAACCGG | 477 |
| | HCVa:327 siRNA 3′-uuuguguag 10 bp | CGUAGACCUUUUUGUGUAGGGUCUACGAGACCUCCCGGTT | 478 |
| | HCVa:327 siRNA 3′-uuuguguag 8 bp | UAGACCUUUUUGUGUAGGGUCUACGAGACCUCCCGGTT | 479 |
| | HCVa:327 siRNA 3′-uuuguguag 6 bp | GACCUUUUUGUGUAGGGUCUACGAGACCUCCCGGTT | 480 |
| | HCVa:327 siRNA 3′-uuuguguag 4 bp | CCUUUUUGUGUAGGGUCUACGAGACCUCCCGGTT | 481 |
| | HCVa:327 siRNA 5′-uuuguguag 10 bp | GGUCUACGAGACCUCCCGGUUUUUGUGUAGCCGGGAGGUC | 482 |
| | HCVa:327 siRNA 5′-uuuguguag 8 bp | GGUCUACGAGACCUCCCGGUUUUUGUGUAGCCGGGAGG | 483 |
| | HCVa:327 siRNA 5′-uuuguguag 6 bp | GGUCUACGAGACCUCCCGGUUUUUGUGUAGCCGGGA | 484 |
| | HCVa:327 siRNA 5′-uuuguguag 4 bp | GGUCUACGAGACCUCCCGGUUUUUGUGUAGCCGG | 485 |
| | HCVa:327 siRNA 3′-classl 10 bp stab08 | ucucGuAGAccuuGGucuAcGAGAccucccGGTsT | 486 |
| | (antisense) | | |
| | HCVa:327 siRNA 3′-classl 8 bp stab08 | ucGuAGAccuuGGucuAcGAGAccucccGGTsT | 487 |
| | (antisense) | | |
| | HCVa:327 siRNA 3′-classl 6 bp stab08 | GuAGAccuuGGucuAcGAGAccucccGGTsT | 488 |
| | (antisense) | | |
| | HCVa:327 siRNA 3′-classl 4 bp stab08 | AGAccuuGGucuAcGAGAccucccGGTsT | 489 |
| | (antisense) | | |
| | HCVa:327 siRNA 5′-classl 10 bp stab08 | GGucuAcGAGAccucccGGuuccGGGAGGucu | 490 |
| | (antisense) | | |
| | HCVa:327 siRNA 5′-classl 8 bp stab08 | GGucuAcGAGAccucccGGuuccGGGAGGu | 491 |
| | (antisense) | | |
| | HCVa:327 siRNA 5′-classl 6 bp stab08 | GGucuAcGAGAccucccGGuuccGGGAG | 492 |
| | (antisense) | | |
| | HCVa:327 siRNA 5′-classl 4 bp stab08 | GGucuAcGAGAccucccGGuuccGGG | 493 |
| | (antisense) | | |
| | HCVa:327 siRNA 3′-gaaa 10 bp stab08 | cucGuAGAccGAAAGGucuAcGAGAccucccGGTsT | 494 |
| | (antisense) | | |
| | HCVa:327 siRNA 3′-gaaa 8 bp stab08 | cGuAGAccGAAAGGucuAcGAGAccucccGGTsT | 495 |
| | (antisense) | | |
| | HCVa:327 siRNA 3′-gaaa 6 bp stab08 | uAGAccGAAAGGucuAcGAGAccucccGGTsT | 496 |
| | (antisense) | | |
| | HCVa:327 siRNA 3′-gaaa 4 bp stab08 | GAccGAAAGGucuAcGAGAccucccGGTsT | 497 |
| | (antisense) | | |
| | HCVa:327 siRNA 5′-gaaa 10 bp stab08 | GGucuAcGAGAccucccGGuuGAAAccGGGAGGuc | 498 |
| | (antisense) | | |
| | HCVa:327 siRNA 5′-gaaa 8 bp stab08 | GGucuAcGAGAccucccGGuuGAAAccGGGAGG | 499 |
| | (antisense) | | |
| | HCVa:327 siRNA 5′-gaaa 6 bp stab08 | GGucuAcGAGAccucccGGuuGAAAccGGGA | 500 |
| | (antisense) | | |
| | HCVa:327 siRNA 5′-gaaa 4 bp stab08 | GGucuAcGAGAccucccGGuuGAAAccGG | 501 |
| | (antisense) | | |
| | HCVa:327 siRNA 3′-uuuguguag 10 bp | cGuAGAccuuuuuGuGuAGGGucuAcGAGAccucccGGTsT | 502 |
| | stab08 (antisense) | | |
| | HCVa:327 siRNA 3′-uuuuua 8 pb stab08 | uAGAccuuuuuGuGuAGGGucuAcGAGAccucccGGTsT | 503 |
| | (antisense) | | |
| | HCVa:327 siRNA 3′-uuuguguag 6 bp stab08 | GAccuuuuuGuGuAGGGucuAcGAGAccucccGGTsT | 504 |
| | (antisense) | | |
| | HCVa:327 siRNA 3′-uuuguguag 4 bp stab08 | ccuuuuuGuGuAGGGucuAcGAGAccucccGGTsT | 505 |
| | (antisense) | | |
| | HCVa:327 siRNA 5′-uuuguguag 10 bp | GGucuAcGAGAccucccGGuuuuuGuGuAGcGGGGAGGuc | 506 |
| | stab08 (antisense) | | |
| | HCVa:327 siRNA 5′-uuuguguag 8 bp stab08 | GGucuAcGAGAccucccGGuuuuuGuGuAGccGGGAGG | 507 |
| | (antisense) | | |
| | HCVa:327 siRNA 5′-uuuguguag 6 bp stab08 | GGucuAcGAGAccucccGGuuuuuGuGuAGccGGGA | 508 |
| | (antisense) | | |
| | HCVa:327 siRNA 5′-uuuguguag 4 bp stab08 | GGucuAcGAGAccucccGGuuuuuGuGuAGccGG | 509 |
| | (antisense) | | |
| | HCVa:347L23 siRNA (327C) stab08 | AcGGucuAcGAGAccucccGGTsT | 510 |
| | (antisense) | | |
| | HCVa:346L22 siRNA (327C) stab08 | cGGucuAcGAGAccucccGGTsT | 511 |
| | (antisense) | | |
| | HCVa:344L20 siRNA (327C) stab08 | GucuAcGAGAccucccGGTsT | 512 |
| | (antisense) | | |
| | HCVa:343L19 siRNA (327C) stab08 | ucuAcGAGAccucccGGTsT | 513 |
| | (antisense) | | |
| | HCVa:342L18 siRNA (327C) stab08 | cuAcGAGAccucccGGTsT | 514 |
| | (antisense) | | |
| | HCVa:341L17 siRNA (327C) stab08 | uAcGAGAccucccGGTsT | 515 |
| | (antisense) | | |
| | HCVa:340L16 siRNA (327C) stab08 | AcGAGAccucccGGTsT | 516 |
| | (antisense) | | |
| | HCVa:339L15 siRNA (327C) stab08 | cGAGAccucccGGTsT | 517 |
| | (antisense) | | |
| | HCVa:345L21 siRNA (327C) stab08 | GGucuAcGAGAccucccGGGsG | 518 |
| | GG (antisense) | | |
| | HCVa:345L20 siRNA (327C) stab08 | GGucuAcGAGAccucccGGsG | 519 |
| | G (antisense) | | |
| | HCVa:345L20 siRNA (327C) stab08 | GGucuAcGAGAccucccGGsT | 520 |
| | (antisense) | | |
| | HCVa:345L19 siRNA (327C) stab08 | GGucuAcGAGAccucccGsG | 521 |
| | (antisense) | | |
| | HCVa:345L18 siRNA (327C) stab08 | GGucuAcGAGAccucccsG | 522 |
| | (antisense) | | |
| | HCVa:345L17 siRNA (327C) stab08 | GGucuAcGAGAccuccsc | 523 |
| | (antisense) | | |
| | HCVa:345L16 siRNA (327C) stab08 | GGucuAcGAGAccucsc | 524 |
| | (antisense) | | |
| | HCVa:345L15 siRNA (327C) stab08 | GGucuAcGAGAccusc | 525 |
| | (antisense) | | |
| | HCVa:327U21 siRNA stab07 GT (sense) | B ccGGGAGGucucGuAGAccGT B | 526 |
| | HCVa:327U21 siRNA stab07 (sense) | B cGGGAGGucucGuAGAccTT B | 527 |
| | HCVa:328U20 siRNA stab07 (sense) | B GGGAGGucucGuAGAccTT B | 528 |
| | HCVa:329U19 siRNA stab07 (sense) | B GGAGGucucGuAGAcGTT B | 529 |
| | HCVa:330U18 siRNA stab07 (sense) | B GAGGucucGuAGAccTT B | 530 |
| | HCVa:331U17 siRNA stab07 (sense) | B AGGucucGuAGAccTT B | 531 |
| | HCVa:332U16 siRNA stab07 (sense) | B ccGGGAGGucucGuAGAccT B | 532 |
| | HCVa:327U21 siRNA stab07 (sense) | B ccGGGAGGucucGuAGAcc B | 533 |
| | HCVa:327U21 siRNA stab07 (sense) | B ccGGGAGGucucGuAGAc B | 534 |
| | HCVa:327U21 siRNA stab07 (sense) | B ccGGGAGGucucGuAGA B | 535 |
| | HCVa:327U21 siRNA stab07 (sense) | B ccGGGAGGucucGuAG B | 536 |
| 31270 | FLT1:349U21 siRNA stab09 (sense) | B CUGAGUUUAAA4GGCACCCTT B | 537 |
| 31273 | FLT1:367L21 sFRNA (349C) stab10 | GGGUGCCUUUUAAACUCAGTsT | 538 |
| | (antisense) | | |
| 31276 | FLT1:349U21 siRNA stab09 inv (sense) | B CCCACGGAAAAUUUGAGUCTT B | 539 |
| 31279 | FLT1:367L21 siRNA 3490 stab 10 inv | GACUCAAAUUUUCCGuGGGTsT | 540 |
| | (antisense) | | |
| 31679 | HBV1598 all RNA (sense) | AGGUGAAGCGAAGUGCACAUU | 541 |
| 31336 | HBV:1580U21 siRNA inv stab09 (sense) | B UCCACUUCGCUUCACGUGUTT B | 542 |
| 31338 | HBV:1598L21 siRNA (1580C) inv stab10 | ACACGUGAAGCGAAGUGGATsT | 543 |
| | (antisense) | | |
| 32636 | Luc3:80U21 siRNA stab07 (sense) | B AuAAGGCuAuGAAGAGAuATT B | 544 |
| 32676 | Luc3:98L21 siRNA (80C) stab08 | uAucucuucAuAGccuuAuTsT | 545 |
| | (antisense) | | |
| 32640 | Luc3:237U21 siRNA stab07 (sense) | B cGuAuGcAGuGAAAAcucuTT B | 546 |
| 32680 | Luc3:255L21 siRNA (237C) stab08 | AGAGuuuucAcuGcAuAcGTsT | 547 |
| | (antisense) | | |
| 32662 | Luc3:1478U21 siRNA stab07 (sense) | B uGAcGGAAAAAGAGAucGuTT B | 548 |
| 32702 | Luc3:1496L21 siRNA (1478C) stab08 | AcGAucucuuuuuccGucATsT | 549 |
| | (antisense) | | |
| 32666 | Luc3:1544U21 siRNA stab07 (sense) | B GAGuuGuGuuuGuGGAcGATT B | 550 |
| 32706 | Luc3:1562L21 siRNA (1544C) stab08 | ucGuccAcAAAGAcAAcucTsT | 551 |
| | (antisense) | | |
| 32672 | Luc3:1607U21 siRNA stab07 (sense) | B GAGAGAuccucAuAAAGGcTT B | 552 |
| 32712 | Luc3:1625L21 siRNA (1607C) stab08 | GccuuuAuGAGGAucucucTsT | 553 |
| | (antisense) | | |
| 33139 | HCVa:282U21 siRNA stab07 (sense) | B GcGAAAGGccuuGuGGuAcTT B | 554 |
| 33179 | HCVa:300L21 siRNA (282C) stab08 | GuAccAcAAGGccuuucGcTsT | 555 |
| | (antisense) | | |
| 33140 | HCVa:283U21 siRNA stab07 (sense) | B cGAAAGGccuuGuGGuAcuTT B | 556 |
| 33180 | HCVa:301L21 siRNA (283C) stab08 | AGuAccAcAAGGccuuucGTsT | 557 |
| | (antisense) | | |
| 33145 | HCVa:289U21 siRNA stab07 (sense) | B GccuuGuGGuAcuGccuGATT B | 558 |
| 33185 | HCVa:307L21 siRNA (289C) stab08 | ucAGGcAGuAccAcAAGGcTsT | 559 |
| | (antisense) | | |
| 33149 | HCVa:304U21 siRNA stab07 (sense) | B cuGAuAGGGuGcuuGcGAGTT B | 560 |
| 33183 | HCVa:304L21 siRNA (286C) stab08 | GGcAGuAccAcAAGGccuuTsT | 561 |
| | (antisense) | | |
| 33150 | HCVa:305U21 siRNA stab07 (sense) | B uGAuAGGGuGcuuGCGAGuTT B | 562 |
| 33190 | HCVa:323L21 siRNA (305C) stab08 | AcucGcAAGcAcccuAucATsT | 563 |
| | (antisense) | | |
| 33151 | HCVa:307U21 siRNA stab07 (sense) | B AuAGGGuGcuuGcGAGuGcTT B | 564 |
| 33191 | HCVa:325L21 siRNA (307C) stab08 | GcAcucGcAAGcAcccuAuTsT | 565 |
| | (antisense) | | |
| 33158 | HCVa:317U21 siRNA stab07 (sense) | B uGcGAGuGccccGGGAGGuTT B | 566 |
| 33187 | HCVa:317L21 siRNA (299C) stab08 | AAGcAcccuAucAGGcAGuTsT | 567 |
| | (antisense) | | |
| 33210 | HBV:258U21 siRNA stab07 (sense) | B GuGGuGGAcuucucucAAuTT B | 568 |
| 33250 | HBV:276L21 siRNA (258C) stab08 | AuuGAGAGAAGucCAccAcTsT | 569 |
| | (antisense) | | |
| 33212 | HBV:260U21 siRNA stab07 (sense) | B GGuGGAcuucucucAAuuuTT B | 570 |
| 33252 | HBV:278L21 siRNA (260C) stab08 | AAAuuGAGAGAAGuccAccTsT | 571 |
| | (antisense) | | |
| 33214 | HBV:263U21 siRNA stab07 (sense) | B GGAcuucucucAAuuuucuTT B | 572 |
| 33254 | HBV:281L21 siRNA (263C) stab08 | AGAAAAuuGAGAGAAGuccTsT | 573 |
| | (antisense) | | |
| 32429 | HBV:1583U21 siRNA stab07 (sense) | B GcAcuucGcuucAccucuGTT B | 574 |
| 32438 | HBV:1601L21 siRNA (1583C) stab08 | cAGAGGuGAAGcGAAGuGcTsT | 575 |
| | (antisense) | | |
| 33226 | HBV:1585U21 siRNA stab07 (sense) | B AcuucGcuucAccucuGcATT B | 576 |
| 33266 | HBV:1603L21 siRNA (1585C) stab08 | uGcAGAGGuGAAGcGAAGuTsT | 577 |
| | (antisense) | | |
| 31651 | HBV:1580U21 siRNA stab06 (sense) | B UGUGCACUUCGCUUCACCUTT B | 578 |
| 31652 | HBV:1580U21 siRNA inv stab06 (sense) | B UCCACUUCGCUUCACGUGUTT B | 579 |
| 31653 | HBV:1580U21 siRNA stab16 (sense) | B UGUGCACUUCGCUUCACCUTT B | 580 |
| 31654 | HBV:1580U21 siRNA inv stab16 (sense) | B UCCACUUCGCUUCACGUGUTT B | 581 |
| 31657 | HBV:1580U21 siRNA stab18 (sense) | B uGuGcAcuucGcuucAccuTT B | 582 |
| 31658 | HBV:1580U21 siRNA inv stab18 (sense) | B uccAcuucGcuucAcGuGuTT B | 583 |
| 33573 | HBV:1598L20 siRNA (1581C) stab08 | AGGuGAAGcGAAGuGcAcTsT | 584 |
| | (antisense) | | |
| 33577 | HBV:1581U20 siRNA stab07 modB (sense) | GuGcAcuucGcuucAccuTT | 585 |
| 34124 | HBV:264L15 (246C) 5′ p palindrome siRNA | pCACGAGUCUAGACUC GUGB | 586 |
| 34428 | 5′ n-3 C31270 FLT1:349U21 siRNA stab09 | GAGUUUAAAAGGCACCCTT B | 587 |
| | (sense) | | |
| 34429 | 5′ n-4 C31270 FLT1:349U21 siRNA stab09 | AGUUUAAAAGGCACCCTT B | 588 |
| | (sense) | | |
| 34430 | 5′ n-5 C31270 FLT1:349U21 siRNA stab09 | GUUUAAAAGGCACCCTT B | 589 |
| | (sense) | | |
| 34431 | 5′ n-7 C31270 FLT1:349U21 siRNA stab09 | UUAAAAGGCACCCTT B | 590 |
| | (sense) | | |
| 34432 | 5′ n-9 C31270 FLT1:349U21 siRNA stab09 | AAAAGGCACCCTT B | 591 |
| | (sense) | | |
| 34435 | 3′ n-3 C31270 FLT1:349U21 siRNA stab09 | B CUGAGUUUAAAAGGCACCC | 592 |
| | (sense) | | |
| 34436 | 3′ n-4 C31270 FLT1:349U21 siRNA stab09 | B CUGAGUUUAAAAGGCACC | 593 |
| | (sense) | | |
| 34437 | 3′ n-5 C31270 FLT1:349U21 siRNA stab09 | B CUGAGUUUAAAAGGCAC | 594 |
| | (sense) | | |
| 34438 | 3′ n-7 C31270 FLT1:349U21 siRNA stab09 | B CUGAGUUUAAAAGGC | 595 |
| | (sense) | | |
| 34439 | 5′ n-1 C31273 FLT1:367L21 siRNA (349C) | GGUGCCUUUUAAACUCAGTsT | 596 |
| | stab10 (antisense) | | |
| 34440 | 5′ n-2 C31273 FLT1:367L21 siRNA (349C) | GUGCCUUUUAAACUCAGTsT | 597 |
| | stab10 (antisense) | | |
| 34441 | 5′ n-3 C31273 FLT1:367L21 siRNA (349C) | UGCCUUUUAAACUCAGTsT | 598 |
| | stab10 (antisense) | | |
| 34442 | 5′ n-4 C31273 FLT1:367L21 siRNA (349C) | GCCUUUUAAACUCAGTsT | 599 |
| | stab10 (antisense) | | |
| 34443 | 5′ n-5 C31273 FLT1:367L21 siRNA (349C) | CCUUUUAAACUCAGTsT | 600 |
| | stab10 (antisense) | | |
| 34444 | 3′ n-1 C31273 FLT1:367L21 siRNA (349C) | GGGUGCCUUUUAAACUCAGT | 601 |
| | stab10 (antisense) | | |
| 34445 | 3′ n-2 C31273 FLT1:367L21 siRNA (349C) | GGGUGCCUUUUAAACUCAG | 602 |
| | stab10 (antisense) | | |
| 34446 | 3′ n-3 C31273 FLT1:367L21 siRNA (349C) | GGGUGCCUUUUAAACUCA | 603 |
| | stab10 (antisense) | | |
| 34447 | 3′ n-4 C31273 FLT1:367L21 siRNA (349C) | GGGUGCCUUUUAAACUC | 604 |
| | stab10 (antisense) | | |
| 34448 | 3′ n-5 C31273 FLT1:367L21 siRNA (349C) | GGGUGCCUUUUAAACU | 605 |
| | stab10 (antisense) | | |
| 34449 | 3′ n-7 C31273 FLT1:367L21 siRNA (349C) | GGGUGCCUUUUAAA | 606 |
| | stab10 (antisense) | | |
| 34450 | 3′ n-9 C31273 FLT1:367L21 siRNA (349C) | GGGUGCCUUUUA | 607 |
| | stab10 (antisense) | | |
| 34501 | EGFPc1:1106L21 siRNA (1088C) stab08 | uucAccuuGAuGccGuucu | 608 |
| | Blunt (antisense) | | |
| 34503 | KDR:3733L21 SiRNA (3715C) stab08 Blunt | GccAGcAGuccAGcAuGGu | 609 |
| | (antisense) | | |
| 34505 | KDR:3733L21 siRNA (3715C) inv stab08 | uGGuAcGAcGuGAcGAccG | 610 |
| | Blunt (antisense) | | |
| 34727 | HBV:263U21 siRNA stab00 5′ (n-1) (sense) | GACUUCUCUCAAUUUUCUU | 611 |
| 34728 | HBV:281L21 siRNA stab00 (263C) 3′ (n-1) | AGAAAAUUGAGAGAAGUCTT | 612 |
| | (antisense) | | |
| 34729 | HBV:263U21 siRNA stab00 5′ (n-2) (sense) | ACUUCUCUCAAUUUUCUU | 613 |
| 34730 | HBV:281L21 siRNA stab00 (263C) 3′ (n-2) | AGAAAAUUGAGAGAAGUTT | 614 |
| | (antisense) | | |
| 34731 | HBV:263U21 siRNA stab00 5′ (n-3) (sense) | CUUCUCUCAAUUUUCUTT | 615 |
| 34732 | HBV:281L21 siRNA stab00 (263C) 3′ (n-3) | AGAAAAUUGAGAGAAGTT | 616 |
| | (antisense) | | |
| 34733 | HBV:263U21 siRNA stab00 5′ n-4 (sense) | UUCUCUCAAUUUUCUTT | 617 |
| 34734 | HBV:281L21 siRNA stab00 (263C) 3′ n-4 | AGAAAAUUGAGAGAATT | 618 |
| | (antisense) | | |
| 34735 | HBV:263U21 siRNA stab00 5′ (n-5) (sense) | UCUCUCAAUUUUCUTT | 619 |
| 34736 | HBV:281L21 siRNA stab00 (263C) 3′ (n-5) | AGAAAAUUGAGAGATT | 620 |
| | (antisense) | | |
| 35081 | HBV:1601L20 siRNA (1583C) stab24 | AGAGGuGAAGcGAAGuGcTsT | 621 |
| | (antisense) | | |
| 35082 | HBV:1601L20 siRNA (1583C) stab08 N7 | AGAGGuGAAGcGAAGuGcTsT | 622 |
| | (antisense) | | |
| 35279 | Luc3:80U19 siRNA (sense) | AUAAGGCUAUGAAGAGAUA | 623 |
| 35280 | Luc3:1544U19 siRNA (sense) | GAGUUGUGUUUGUGGACGA | 624 |
| 35281 | Luc3:1288U19 siRNA (sense) | GAACACUUCUUCAUCGUUG | 625 |
| 35282 | Luc3:268U19 siRNA (sense) | AUGCCGGUGUUGGGCGCGU | 626 |
| 35283 | rLuc:231U19 siRNA (sense) | CCUUAUUGGUAUGGGCAAA | 627 |
| 35284 | rLuc:165U19 siRNA (sense) | CUCUUCUUAUUUAUGGCGA | 628 |
| 35285 | rLuc:84U19 siRNA (sense) | UGUUCUUGAUUCAUUUAUU | 629 |
| 35286 | rLuc:375U19 siRNA (sense) | GGCAUUUCAUUAUAGCUAU | 630 |
| 35287 | Luc3:98L19 siRNA (80C) (antisense) | UAUCUCUUCAUAGCCUUAU | 631 |
| 35288 | Luc3:1562L19 siRNA (1544C) (antisense) | UCGUCCACAAACACAACUC | 632 |
| 35289 | Luc3:1306L19 siRNA (1288C) (antisense) | CAACGAUGAAGAAGUGUUC | 633 |
| 35290 | Luc3:286L19 siRNA (268C) (antisense) | ACGCGCCCAACACCGGCAU | 634 |
| 35291 | rLuc:249L19 siRNA (231C) (antisense) | UUUGCCCAUACCAAUAAGG | 635 |
| 35292 | rLuc:183L19 siRNA (165C) (antisense) | UCGCCAUAAAUAAGAAGAG | 636 |
| 35293 | rLuc:102L19 siRNA (84C) (antisense) | AAUAAAUGAAUCAAGAACA | 637 |
| 35294 | rLuc:393L19 siRNA (375C) (antisense) | AUAGCUAUAAUGAAAUGCC | 638 |
| 35764 | Luc3:118U19 stab00 siRNA (sense) | AUUGCUUUUACAGAUGCAC | 639 |
| 35765 | Luc3:150U19 stab00 siRNA (sense) | CAUCACUUACGCUGAGUAC | 640 |
| 35766 | Luc3:255U19 stab00 siRNA (sense) | UCUUCAAUUCUUUAUGCCG | 641 |
| 35767 | Luc3:325U19 stab00 siRNA (sense) | UAUAAUGAACGUGAAUUGC | 642 |
| 35768 | Luc3:326U19 stab00 siRNA (sense) | AUAAUGAACGUGAAUUGCU | 643 |
| 35769 | Luc3:470U19 stab00 siRNA (sense) | AUUACCAGGGAUUUCAGUC | 644 |
| 35770 | Luc3:503U19 stab00 siRNA (sense) | UCACAUCUCAUCUACCUCC | 645 |
| 35771 | Luc3:595U19 stab00 siRNA (sense) | UCUGGAUCUACUGGUCUGC | 646 |
| 35772 | Luc3:676U19 stab00 siRNA (sense) | AUUUUUGGCAAUCAAAUCA | 647 |
| 35773 | Luc3:761U19 stab00 siRNA (sense) | GAUAUUUGAUAUGUGGAUU | 648 |
| 35774 | Luc3:764U19 stab00 siRNA (sense) | AUUUGAUAUGUGGAUUUCG | 649 |
| 35775 | Luc3:765U19 stab00 siRNA (sense) | UUUGAUAUGUGGAUUUCGA | 650 |
| 35776 | Luc3:769U19 stab00 siRNA (sense) | AUAUGUGGAUUUCGAGUCG | 651 |
| 35777 | Luc3:806U19 stab00 siRNA (sense) | AAGAAGAGCUGUUUCUGAG | 652 |
| 35778 | Luc3:874U19 stab00 siRNA (sense) | UUCUCCUUCUUCGCCAAAA | 653 |
| 35779 | Luc3:875U19 stab00 siRNA (sense) | UCUCCUUCUUCGCCAAAAG | 654 |
| 35780 | Luc3:876U19 stab00 siRNA (sense) | CUCCUUCUUCGCCAAAAGC | 655 |
| 35781 | Luc3:902U19 stab00 siRNA (sense) | UUGACAAAUACGAUUUAUC | 656 |
| 35782 | Luc3:938U19 stab00 siRNA (sense) | CUUCUGGUGGCGCUCCCCU | 657 |
| 35783 | Luc3:1099U19 stab00 siRNA (sense) | CCAUUUUUUGAAGCGAAGG | 658 |
| 35784 | Luc3:1100U19 stab00 siRNA (sense) | CAUUUUUUGAAGCGAAGGU | 659 |
| 35785 | Luc3:1293U19 stab00 siRNA (sense) | CUUCUUCAUCGUUGACCGC | 660 |
| 35786 | Luc3:1340U19 stab00 siRNA (sense) | AUCAGGUGGCUCCCGCUGA | 661 |
| 35787 | Luc3:1512U19 stab00 siRNA (sense) | UCAAGUAACAACCGCGAAA | 662 |
| 35788 | Luc3:1513U19 stab00 siRNA (sense) | CAAGUAACAACCGCGAAAA | 663 |
| 35789 | Luc3:136L19 (118C) stab00 siRNA | GUGCAUCUGUAAAAGCAAU | 664 |
| | (antisense) | | |
| 35790 | Luc3:168L19 (150C) stab00 siRNA | GUACUCAGCGUAAGUGAUG | 665 |
| | (antisense) | | |
| 35791 | Luc3:273L19 (255C) stab00 siRNA | CGGCAUAAAGAAUUGAAGA | 666 |
| | (antisense) | | |
| 35792 | Luc3:343L19 (325C) stab00 siRNA | GCAAUUCACGUUCAUUAUA | 667 |
| | (antisense) | | |
| 35793 | Luc3:344L19 (326C) stab00 siRNA | AGCAAUUCACGUUCAUUAU | 668 |
| | (antisense) | | |
| 35794 | Luc3:488L19 (470C) stab00 siRNA | GACUGAAAUCCCUGGUAAU | 669 |
| | (antisense) | | |
| 35795 | Luc3:521L19 (503C) stab00 siRNA | GGAGGUAGAUGAGAUGUGA | 670 |
| | (antisense) | | |
| 35796 | Luc3:613L19 (595C) stab00 siRNA | GCAGACCAGUAGAUCCAGA | 671 |
| | (antisense) | | |
| 35797 | Luc3:694L19 (676C) stab00 siRNA | UGAUUUGAUUGCCAAAAAU | 672 |
| | (antisense) | | |
| 35798 | Luc3:779L19 (761C) stab00 siRNA | AAUCCACAUAUCAAAUAUC | 673 |
| | (antisense) | | |
| 35799 | Luc3:782L19 (764C) stab00 siRNA | CGAAAUCCACAUAUCAAAU | 674 |
| | (antisense) | | |
| 35800 | Luc3:783L19 (765C) stab00 siRNA | UCGAAAUCCACAUAUCAAA | 675 |
| | (antisense) | | |
| 35801 | Luc3:787L19 (769C) stab00 siRNA | CGACUCGAAAUCCACAUAU | 676 |
| | (antisense) | | |
| 35802 | Luc3:824L19 (806C) stab00 siRNA | CUCAGAAACAGCUCUUCUU | 677 |
| | (antisense) | | |
| 35803 | Luc3:892L19 (874C) stab00 siRNA | UUUUGGCGAAGAAGGAGAA | 678 |
| | (antisense) | | |
| 35804 | Luc3:893L19 (875C) stab00 siRNA | CUUUUGGCGAAGAAGGAGA | 679 |
| | (antisense) | | |
| 35805 | Luc3:894L19 (876C) stab00 siRNA | GCUUUUGGCGAAGAAGGAG | 680 |
| | (antisense) | | |
| 35806 | Luc3:920L19 (902C) stab00 siRNA | GAUAAAUCGUAUUUGUCAA | 681 |
| | (antisense) | | |
| 35807 | Luc3:956L19 (938C) stab00 siRNA | AGGGGAGCGCCACCAGAAG | 682 |
| | (antisense) | | |
| 35808 | Luc3:1117L19 (1099C) stab00 siRNA | CCUUCGCUUCAAAAAAUGG | 683 |
| | (antisense) | | |
| 35809 | Luc3:1118L19 (1100C) stab00 siRNA | ACCUUCGCUUCAAAAAAUG | 684 |
| | (antisense) | | |
| 35810 | Luc3:1311L19 (1293C) stab00 siRNA | GCGGUCAACGAUGAAGAAG | 685 |
| | (antisense) | | |
| 35811 | Luc3:1358L19 (1340C) stab00 siRNA | UCAGCGGGAGCCACCUGAU | 686 |
| | (antisense) | | |
| 35812 | Luc3:1530L19 (1512C) stab00 siRNA | UUUCGCGGUUGUUACUUGA | 687 |
| | (antisense) | | |
| 35813 | Luc3:1531L19 (1513C) stab00 siRNA | UUUUCGCGGUUGUUACUUG | 688 |
| | (antisense) | | |
| 35819 | HBV:263U19 siRNA stab07 minus TT & iB | GGAcuucucucAAuuuucu | 689 |
| | (sense) | | |
| 35821 | HBV:281L19 siRNA (263C) stab24 minus | AGAAAAuuGAGAGAAGucc | 690 |
| | TsT (antisense) | | |
| 35911 | HBV:281L19 siRNA (263C) stab00 | AGAAAAUUGAGAGAAGUCC | 691 |
| | (antisense) | | |
| 35912 | PRKCA:1161L19 siRNA (1143C) stab00 | AUCCUGAAUCACCACAUCC | 692 |
| | (antisense) | | |
| 36457 | FLT1:349U19 siRNA stab00 − 3′ TT | CUGAGUUUAAAAGGCACCC | 693 |
| | (sense) | | |
| 36459 | FLT1:367L19 siRNA (349C) stab00 + 5 | B GGGUGCCUUUUAAACUCAG | 694 |
| | iB − 3′ TT (antisense) | | |
| 36461 | FLT1:349U21 siRNA stab07 − 5′ | cuGAGuuuAAAAGGcAccc | 695 |
| | iB − 3′ TTB (sense) | | |
| 36462 | FLT1:367L19 siRNA (349C) stab08 − 3′ | GGGuGccuuuuAAAcucAG | 696 |
| | TsT (antisense) | | |
| 32714 | HCVa:313L21 siRNA (295C) v1 5′ p | pACCCUAUCAGGCAGUACCA GUACUGCCUGAU B | 697 |
| | palindrome | | |
| 32715 | HCVa:313L21 siRNA (295C) v2 5′ p | pACCCUAUCAGGCAGUACC GGUACUGCCUGAU B | 698 |
| | palindrome | | |
| 32716 | HCVa:5′ p-345L21 (327C) v5 5′ p | pGGUCUACGAGACCUCCCGG AGGUCUCGUAGA B | 699 |
| | palindrome siRNA | | |
| 32717 | HCVa:5′ p-345L21 (327C) v6 5′ p | pGGUCUACGAGACCUCC GGAGGUCUCGUA B | 700 |
| | palindrome siRNA | | |
| 32718 | FLT1:367L21 siRNA (349C) v1 5′ p | pGGGUGCCUUUUAAACUC GAGUUUAAAAG B | 701 |
| | palindrome | | |
| 32719 | FLT1:367L21 siRNA (349C) v2 5′ p | pGGGUGCCUUUUAAACUCAG GAGUUUAAAAG B | 702 |
| | palindrome | | |
| 32720 | FLT1:2967L21 siRNA (2949C) v1 5′ p | pCAUCAGAGGCCCUCCUUGC AAGGAGGGCCUCU B | 703 |
| | palindrome | | |
| 32721 | FLT1:2967L21 siRNA (2949C) v2 5′ p | pCAUCAGAGGCCCUCCUU AAGGAGGGCCUCUG B | 704 |
| | palindrome | | |
| 32722 | FLT1:2967L21 siRNA (2949C) v3 5′ p | pCAUCAGAGGCCCUCCU AGGAGGGCCUCUG B | 705 |
| | palindrome | | |
| 32723 | mFAS:942L21 siRNA (924C; JL873) v1 5′ p | pGUUCUGCGACAUUCGGCUU GCCGAAUGUCGCCA B | 706 |
| | palindrome | | |
| 32724 | mFAS:942L21 siRNA (924C; JL873) v2 5′ p | pGUUCUGCGACAUUCGGC GCCGAAUGUCGCCA B | 707 |
| | palindrome | | |
| 32725 | HBV:1598L21 (1580C) V palindrome siRNA | AGGUGAAGCGAAGUGCACA CUUCGCUUCA u B | 708 |
| 32726 | HBV:5′ p-1598L21 (1580C) v1 5′ p | pAGGUGAAGCGAAGUG CACUUCGCUU B | 709 |
| | palindrome siRNA | | |
| 32727 | HBV:5′ p-1598L21 (1580C) v2 5′ p | pAGGUGAAGCGAAGUG CACUUCGCUUC B | 710 |
| | palindrome siRNA | | |
| 32728 | HBV:5′ p-1598L21 (1580C) v3 5′ p | pAGGUGAAGCGAAGUG CACUUCGCUUCAC B | 711 |
| | palindrome siRNA | | |
| 32729 | HBV:5′ p-1598L21 (1580C) v4 5′ p | pAGGUGAAGCGAAGU ACUUCGCUUCAC B | 712 |
| | palindrome siRNA | | |
| 32805 | FLT1:373L21 siRNA (354C) v1 5′ p | pGUGCUGGGUGCCUUUUAAA AGGCACCCAGC B | 713 |
| | palindrome | | |
| 32806 | FLT1:373L21 siRNA (354C) v2 5′ p | pGUGCUGGGUGCCUUUAAA GGCACCCAGC B | 714 |
| | palindrome | | |
| 32807 | FLT1:373L21 siRNA (354C) v3 5′ p | pGUGCUGGGUGCCUUAAGGCACCCAGC B | 715 |
| | palindrome | | |
| 32808 | FLT1:1247L21 siRNA (1229C) v1 5′ p | pAAUGCUUUAUCAUAUAUAU GAUAAAGC B | 716 |
| | palindrome | | |
| 32809 | FLT1:1247L21 siRNA (1229C) v2 5′ p | pAAUGCUUUAUCAUAUAU GAUAAAGC B | 717 |
| | palindrome | | |
| 32810 | FLT1:1247L21 siRNA (1229C) v3 5′ p | pAAUGCUUUAUCAUAU GAUAAAGC B | 718 |
| | palindrome | | |
| 32811 | FLT1:1247L21 siRNA (1229C) v4 5′ p | pAAUGCUUUAUCAUAU GAUAAAGCA B | 719 |
| | palindrome | | |
| 32812 | FLT1:1247L21 siRNA (1229C) v5 5′ p | pAAGCUUUAUCAUAUAU GAUAAAGCAUU B | 720 |
| | palindrome | | |
| 32813 | FLT1:1247L21 siRNA (1229C) v6 5′ p | pAAUGCUUUAUCAUAU GAUAAAGCAUU B | 721 |
| | palindrome | | |
| 33056 | FLT1:367L21 siRNA (349C) v3 5′ p | pGGGUGCCUUUUAAACUCAG GAGUUUAAAAGG B | 722 |
| | palindrome | | |
| 33057 | FLT1:367L21 siRNA (349C) v4 5′ p | pGGGUGCCUUUUAAACUC GAGUUUAAAAGGCA B | 723 |
| | palindrome | | |
| 33058 | FLT1:367L21 siRNA (349C) v5 5′ p | pGGGUGCCUUUUAAACU AGUUUAAAAGG B | 724 |
| | palindrome | | |
| 33059 | FLT1:367L21 siRNA (349C) v6 5′ p | pGGGUGCCUUUUAAACU AGUUUAAAAGGC B | 725 |
| | palindrome | | |
| 33060 | FLT1:367L21 siRNA (349C) v7 5′ p | pGGGUGCCUUUUAAACU AGUUUAAAAGGCA B | 726 |
| | palindrome | | |
| 33061 | FLT1:367L21 siRNA (349C) v8 5′ p | pGGGUGCCUUUUAAACU AGUUUAAAAGGCAC B | 727 |
| | palindrome | | |
| 33062 | FLT1:367L21 siRNA (349C) v9 5′ p | pGGGUGCCUUUUAAAC GUUUAAAAGGC B | 728 |
| | palindrome | | |
| 33063 | FLT1:367L21 siRNA (349C) v10 5′ p | pGGGUGCCUUUUAAAC GUUUAAAAGGCA B | 729 |
| | palindrome | | |
| 33064 | FLT1:367L21 siRNA (349C) v11 5′ p | pGGGUGCCUUUUAAAC GUUUAAAAGGCAC B | 730 |
| | palindrome | | |
| 33092 | FLT1:373L18 siRNA (354C) v4 5′ p | pUGCUGGGUGCCUUUUAAA AGGCACCCAGC B | 731 |
| | palindrome | | |
| 33093 | FLT1:373L17 siRNA (354C) v5 5′ p | pGCUGGGUGCCUUUUAAA AGGCACCCAGC B | 732 |
| | palindrome | | |
| 33094 | FLT1:373L17 siRNA (354C) v6 5′ p | pGCUGGGUGCCUUUUAAA AGGCACCCAGCT B | 733 |
| | palindrome | | |
| 34095 | FLT1:373L17 siRNA (354C) v7 5′ p | pGCUGGGUGCCUUUUAAA AGGCACCCAG B | 734 |
| | palindrome | | |
| 34096 | FLT1:373L16 siRNA (354C) v8 5′ p | pCUGGGUGCCUUUUAAA AGGCACCCAG B | 735 |
| | palindrome | | |
| 34097 | FLT1:373L16 siRNA (354C) v9 5′ p | pCUGGGUGCCUUUUAAA AGGCACCCA B | 736 |
| | palindrome | | |
| 34098 | FLT1:373L15 siRNA (354C) v10 5′ p | pUGGGUGCCUUUUAAA AGGCACCCA B | 737 |
| | palindrome | | |
| 34099 | FLT1:373L15 siRNA (354C) v11 5′ p | pUGGGUGCCUUUUAAA AGGCACCCAT B | 738 |
| | palindrome | | |
| 34100 | FLT1:373L15 siRNA (354C) v12 5′ p | pUGGGUGCCUUUUAAA AGGCACCCATT B | 739 |
| | palindrome | | |
| 34101 | FLT1:1247L21 siRNA (1229C) v14 5′ p | pUGCUUUAUCAUAUAUAU GAUAAAGCA B | 740 |
| | palindrome | | |
| 34102 | FLT1:1247L21 siRNA (1229C) v15 5′ p | pUGCUUUAUCAUAUAUAU GAUAAAGC B | 741 |
| | palindrome | | |
| 34103 | FLT1:1247L21 siRNA (1229C) v16 5′ p | pGCUUUAUCAUAUAUAU GAUAAAGC B | 742 |
| | palindrome | | |
| 34104 | FLT1:1247L17 siRNA (1229C) v5 | AAUGCUUUAUCAUAUAU GAUAAAGCAUU B | 743 |
| | palindrome | | |
| 34105 | FLT1:1247L17 siRNA (1229C) v7 5′ p | pAAUGCUUUAUCAUAUAU GAUAAAGCAUUT B | 744 |
| | palindrome | | |
| 34106 | FLT1:1247L17 siRNA (1229C) v8 5′ p | pAAUGCUUUAUCAUAUAU GAUAAAGCAUUTT B | 745 |
| | palindrome | | |
| 34107 | FLT1:1247L17 siRNA (1229C) v9 5′ p | pAAUGCUUUAUCAUAUAU GAUAAAGCAU B | 746 |
| | palindrome | | |
| 34108 | FLT1:1247L16 siRNA (1229C) v10 5′ p | pAUGCUUUAUCAUAUAU GAUAAAGCAU B | 747 |
| | palindrome | | |
| 34109 | FLT1:1247L16 siRNA (1229C) v11 5′ p | pAUGCUUUAUCAUAUAU GAUAAAGCAUT B | 748 |
| | palindrome | | |
| 34110 | FLT1:1247L16 siRNA (1229C) v12 5′ p | pAUGCUUUAUCAUAUAU GAUAAAGCAUTT B | 749 |
| | palindrome | | |
| 34111 | FLT1:1247L16 siRNA (1229C) v13 5′ p | pAUGCUUUAUCAUAUAU GAUAAAGCA B | 750 |
| | palindrome | | |
| 34112 | FLT1:1247L17 siRNA (1229C) v14 5′ p | pAAUGCUUUAUCAUAUAU CUAUAAGCAUU B | 751 |
| | palindrome | | |
| 34113 | FLT1:1247L17 siRNA (1229C) v15 5′ p | pAAUGCUUUUAGUUAUAU GAUAAAGCAUU B | 752 |
| | palindrome | | |
| 34114 | FLT1:1247L17 siRNA (1229C) v16 5′ p | pAAUCCUUAAUCUUAUUU GAUAAAGCAUU B | 753 |
| | palindrome | | |
| 34115 | FLT1:1247L17 siRNA (1229C) v17 5′ p | pAAuGcuuuAucAuAuAu GAuAAAGcAuu B | 754 |
| | palindrome | | |
| 34116 | FLT1:1247L17 siRNA (1229C) v18 5′ p | pAAuGCuuuAuCAuAuAu GAuAAAGcAuu B | 755 |
| | palindrome | | |
| 34117 | HBV:197L18 (179C) 5′ p palindrome siRNA | pCGAGCAGGGGUCCUAGGA CCCCUGCUCGB | 756 |
| 34118 | HBV:197L17 (179C) 5′ p palindrome siRNA | pGAGCAGGGGUCCUAGGA CCCCUGCUCB | 757 |
| 34119 | HBV:197L16 (179C) 5′ p palindrome siRNA | pAGCAGGGGUCCUAGGA CCCCUGCUB | 758 |
| 34120 | HBV:197L16 (179C) 5′ p palindrome siRNA | pGCAGGGGUCCUAGGA CCCCUGCB | 759 |
| 34121 | HBV:264L19 (246C) 5′ p palindrome siRNA | pCCACCACGAGUCUAGACUC GUGGUGGB | 760 |
| 34122 | HBV:264L17 (246C) 5′ p palindrome siRNA | pACCACGAGUCUAGACUC GUGGUB | 761 |
| 34123 | HBV:264L16 (246C) 5′ p palindrome siRNA | pCCACGAGUCUAGACUC GUGGB | 762 |
| 34125 | HBV:1597L17 (1581C) 5′ p palindrome | pGGUGAAGCGAAGUGCAC UUCGCUUCACCB | 763 |
| | siRNA | | |
| 34126 | HBV:1597L16 (1581C) 5′ p palindrome | pGUGAAGCGAAGUGCAC UUCGCUUCACB | 764 |
| | siRNA | | |
| 34127 | HBV:1597L15 (1581C) 5′ p palindrome | pUGAAGCGAAGUGCAC UUCGCUUCAB | 765 |
| | siRNA | | |
| 34128 | HCVb:100L18 (82C) 5′ p palindrome siRNA | pUCAUACUAACGCCAUGGC GUUAGUAUGAB | 766 |
| 34129 | HCVb:100L17 (82C) 5′ p palindrome siRNA | pCAUACUAACGCCAUGGC GUUAGUAUGB | 767 |
| 34130 | HCVb:100L16 (82C) 5′ p palindrome siRNA | pAUACUAACGCCAUGGC GUUAGUAUB | 768 |
| 34131 | HCVb:100L15 (82C) 5′ p palindrome siRNA | pUACUAACGCCAUGGC GUUAGUAB | 769 |
| 34132 | HCVb:144L19 (126C) 5′ p palindrome | pACUAUGGCUCUCCCGGGAG AGCCAUAGUB | 770 |
| | siRNA | | |
| 34133 | HCVb:144L18 (126C) 5′ p palindrome | pCUAUGGCUCUCCCGGGAG AGCCAUAGB | 771 |
| | siRNA | | |
| 34134 | HCVb:144L17 (126C) 5′ p palindrome | pUAUGGCUCUCCCGGGAG AGCCAUAB | 772 |
| | siRNA | | |
| 34135 | HCVb:144L16 (126C) 5′ p palindrome | pAUGGCUCUCCCGGGAG AGCCAUB | 773 |
| | siRNA | | |
| 34136 | HCVb:144L15 (126C) 5′ p palindrome | pUGGCUCUCCCGGGAG AGCCAB | 774 |
| | siRNA | | |
| 34137 | HCVb:172L17 (155C) 5′ p palindrome | pCCGGUGUACUCACCGGU GAGUACACCGGB | 775 |
| | siRNA | | |
| 34138 | HCVb:172L16 (155C) 5′ p palindrome | pCGGUGUACUCACCGGU GAGUACACCGB | 776 |
| | siRNA | | |
| 34139 | HCVb:172L15 (155C) 5′ p palindrome | pGGUGUACUCACCGGU GAGUACACCB | 777 |
| | siRNA | | |
| 34140 | HCVb:332L17 (315C) 5′ p palindrome | pCUACGAGACCUCCCGGG AGGUCUCGUAGB | 778 |
| | siRNA | | |
| 34141 | HCVb:332L16 (315C) 5′ p palindrome | pUACGAGACCUCCCGGG AGGUCUCGUAB | 779 |
| | siRNA | | |
| 34142 | HCVb:332L15 (315C) 5′ p palindrome | pACGAGACCUCCCGGG AGGUCUCGUB | 760 |
| | siRNA | | |
| 34676 | FLT1:1501U21 siRNA stab00 (sense) | CUCACUGCCACUCUAAUUGTT | 781 |
| 34677 | FLT1:1502U21 siRNA stab00 (sense) | UCACUGCCACUCUAAUUGUTT | 782 |
| 34678 | FLT1:1503U21 siRNA stab00 (sense) | CACUGCCACUCUAAUUGUCTT | 783 |
| 34679 | FLT1:5353U21 siRNA stab00 (sense) | GACCCCGUCUCUAUACCAATT | 784 |
| 34680 | KDR:503U21 siRNA stab00 (sense) | AGAGUGGCAGUGAGCAAAGTT | 785 |
| 34681 | VEGF:360U21 siRNA stab00 (sense) | AGAGACGGGGUCAGAGAGATT | 786 |
| 34682 | VEGF:1562U21 siRNA stab00 (sense) | AGCAUUUGUUUGUACAAGATT | 787 |
| 34683 | HBV:1583U21 siRNA stab00 (sense) | GCACUUCGCUUCACCUCUGTT | 788 |
| 34684 | FLT1:1519L21 (1501C) siRNA stab00 | CAAUUAGAGUGGCAGUGAGTT | 789 |
| 34685 | FLT1:1520L21 (1502C) siRNA stab00 | ACAAUUAGAGUGGCAGUGATT | 790 |
| 34686 | FLT1:1521L21 (1503C) siRNA stab00 | GACAAUUAGAGUGGCAGUGTT | 791 |
| 34687 | FLT1:5371L21 (5353C) siRNA stab00 | UUGGUAUAGAGACGGGGUCTT | 792 |
| 34688 | KDR:521L21 (503C) siRNA stab00 | CUUUGCUCACUGCCACUCUTT | 793 |
| 34689 | VEGF:378L21 (360C) siRNA stab00 | UCUCUCUGACCCCGUCUCUTT | 794 |
| 34690 | VEGF:1580L21 (1562C) siRNA stab00 | UCUUGUACAAACAAAUGCUTT | 795 |
| 34691 | HBV:1601L21 siRNA (1583C) stab00 | CAGAGGUGAAGCGAAGUGCTT | 796 |
| 34692 | F/K bf-1a siRNA stab00 [FLT1:1519L21 | CAAUUAGAGUGGCAGUGAGCAAAGTT | 797 |
| | (1501C) − 14 + KDR:503U21] | | |
| 34693 | F/K bf-2a siRNA stab00 [FLT1:1520L21 | ACAAUUAGAGUGGCAGUGAGCAAAGTT | 798 |
| | (1502C) − 13 + KDR:503U21] | | |
| 34694 | F/K bf-3a siRNA stab00 [FLT1:1521L21 | GACAAUUAGAGUGGCAGUGAGCAAAGTT | 799 |
| | (1503C) − 12 + KDR:503U21] | | |
| 34695 | V/F bf-1a siRNA stab00 [FLT1:3664L19 | UGUGCCAGCAGUCCAGCAUUUGUUUGUACAAGATT | 800 |
| | (3646C) − 5 + VEGF:1562U21] | | |
| 34696 | V/F bf-2a siRNA stab00 [FLT1:5371L19 | UUGGUAUAGAGACGGGGUCAGAGAGATT | 801 |
| | (5353C) − 12 + VEGF:360U21] | | |
| 34697 | F/K bf-1b siRNA stab00 [KDR:521L21 | CUUUGCUCACUGCCACUCUAAUUGTT | 802 |
| | (503C) − 14 + FLT1:1501U21] | | |
| 34698 | F/K bf-2b siRNA stab00 [KDR:521L21 | CUUUGCUCACUGCCACUCUAAUUGUTT | 803 |
| | (503C) − 13 + FLT1:1502U2] | | |
| 34699 | F/K bf-3b siRNA stab00 [KDR:521L21 | CUUUGCUCACUGCCACUCUAAUUGUCTT | 804 |
| | (503C) − 12 + FLT1:1503U21] | | |
| 34700 | V/F bf-1b siRNA stab00 [VEGF:1580L19 | UCUUGUACAAACAAAUGCUGGACUGCUGGCACATT | 805 |
| | (1562C) − 5 + FLT1:3646U21] | | |
| 34701 | V/F bf-2b siRNA stab00 [VEGF:378L21 | UCUCUCUGACCCCGUCUCUAUACCAATT | 806 |
| | (360C) − 12 + FLT1:5353U21] | | |
| 34702 | V/F bf-3a siRNA stab00 [FLT1:3664L19 | UGUGCCAGCAGUCCAGCAU UGUGAAUGCAGACCAAAGATT | 807 |
| | (3646C) + VEGF1420:U21] | | |
| 34703 | V/F bf-3b siRNA stab00 [VEGF1438:L19 | UCUUUGGUCUGCAUUCACA AUGCUGGACUGCUGGCACATT | 808 |
| | (1420C) + FLT1:3646U21] | | |
| 34704 | V/F bf-4a siRNA stab00 [FLT1:3664L17 | UGUGCCAGCAGUCCAGC UGAAUGCAGACCAAAGATT | 809 |
| | (3648C) + VEGF1422:U19] | | |
| 34705 | V/F bf-4b siRNA stab00 [VEGF143B:L17 | UCUUUGGUCUGCAUUCA GCUGGACUGCUGGCACATT | 810 |
| | (1422C) + FLT1:3648U19] | | |
| 34706 | V/F bf-5a siRNA stab00 [FLT1:3664L19 | UGUGCCAGCAGUCCAGCAU GAAUGCAGACCAAAGAAAGTT | 811 |
| | (3646C) + VEGF1423:U19] | | |
| 34707 | V/F bf-5b siRNA stab00 [VEGF1441:L19 | CUUUCUUUGGUCUGCAUUC AUGCUGGACUGCUGGCACATT | 812 |
| | (1420C) + FLT1:3646U21] | | |
| 34708 | V/F bf-6a siRNA stab00 [FLT1:3664L19 | UGUGCCAGCAGUCCAGCAU GUGAAUGCAGACCAAAGAATT | 813 |
| | (3646C) + VEGF1421:U21] | | |
| 34709 | V/F bf-6b siRNA stab00 [VEGF1439:L19 | UUCUUUGGUCUGCAUUCAC AUGCUGGACUGCUGGCACATT | 814 |
| | (1421C) + FLT1:3846U21] | | |
| 34710 | H/P bf-1a siRNA stab00 [HBV:1601L19 | CAGAGGUGAAGCGAAGUGC GGAUGUGGUGAUUCAGGAUTT | 815 |
| | (1563C) + PRKCA:1143U21] | | |
| 34711 | H/P bf-1b siRNA stab00 [PRKCA:1161L19 | AUCCUGAAUCACCACAUCC GCACUUCGCUUCACCUCUGTT | 816 |
| | (1143C) + HBV:1583U21] | | |
| 34712 | H/P bf-2a siRNA stab00 [HBV:281L19 | AGAAAAUUGAGAGAAGUCC GGAUGUGGUGAUUCAGGAUTT | 817 |
| | (263C) + PRKCA:1143U21] | | |
| 34713 | H/P bf-2b siRNA stab00 [PRKCA:1161L19 | AUCCUGAAUCACCACAUCC GGACUUCUCUCAAUUUUCUTT | 818 |
| | (1143C) + HBV:263U2] | | |
| 34955 | HBV:281L19 (263C) v1 palindrome siRNA | AGAAAAUUGAGAGAAGUUUCUCUCAAUUUUCU | 819 |
| 34956 | HBV:281L19 (263C) v2 palindrome siRNA | AGAAAAUUGAGAGAAGCUUCUCUCAAUUUUCU | 820 |
| 34957 | HBV:281L19 (263C) v3 palindrome siRNA | AGAAAAUUGAGAGAAUUCUCUCAAUUUUCU | 821 |
| 34958 | HBV:281L19 (263C) v4 palindrome siRNA | AGAAAAUUGAGAGAAGUUUCUCUCAAUUUUC | 822 |
| 34959 | HBV:281L19 (263C) v5 palindrome siRNA | AGAAAAUUGAGAGAAGCUUCUCUCAAUUUUC | 823 |
| 34960 | HBV:281L19 (263C) v6 palindrome siRNA | AGAAAAUUGAGAGAAUUCUCUCAAUUUUC | 824 |
| 34961 | HBV:281L19 (263C) v7 palindrome siRNA | AGAAAAUUGAGAGAAUUCUCUCAAUUUU | 825 |
| 34962 | HBV:281L19 (263C) v8 palindrome siRNA | AGAAAAUUGAGAGAAUUCUCUCAAUUU | 826 |
| 34963 | HBV:1598L17 (1581C) v1 palindrome siRNA | GGUGAAGCGAAGUGCACUUCGCUUCACC | 827 |
| 34964 | HBV:1598L17 (1581C) v2 palindrome siRNA | GGUGAAGCGAAGUGCACUUCGCUUCACCTT | 828 |
| 34965 | HBV:1598L17 (1581C) v3 palindrome siRNA | GGUGAAGCGAAGUGCACUUCGCUUCACCT | 829 |
| 34966 | HBV:1598L17 (1581C) v4 palindrome siRNA | GGUGAAGCGAAGUGCACUUCGCUUCACU | 830 |
| 34967 | HBV:1598L17 (1581C) v5 palindrome siRNA | GGUGAAGCGAAGUGCACUUCGCUUCACUTT | 831 |
| 34968 | HBV:1598L17 (1581C) v6 palindrome | GGUGAAGCGAAGUGCACUUCGCUUCAUU | 832 |
| | siRNA | | |
| 34969 | HBV:1598L19 (1581C) v1 palindrome | GAGGUGAAGCGAAGUGCACUUCGCUUCACCUC | 833 |
| | siRNA | | |
| 34970 | HBV:1598L19 (1581C) v2 palindrome | AGGUGAAGCGAAGUGCACUUCGCUUCACCU | 834 |
| | siRNA | | |
| 34971 | HBV:265L19 (246C) v1 palindrome siRNA | CCACCACGAGUCUAGACUCGUGGUGG | 835 |
| 34972 | HBV:265L19 (246C) v2 palindrome siRNA | CCACCACGAGUCUAGACUCGUGGUUU | 836 |
| 34973 | HBV:265L18 (246C) v1 palindrome siRNA | CACCACGAGUCUAGACUCGUGGUG | 837 |
| 34974 | HBV:265L18 (246C) v2 palindrome siRNA | CACCACGAGUCUAGACUCGUGGUGTT | 838 |
| 34975 | HBV:265L18 (246C) v3 palindrome siRNA | CACCACGAGUCUAGACUCGUGGUU | 839 |
| 34976 | HBV:265L18 (246C) v4 palindrome siRNA | CACCACGAGUCUAGACUCGUGGUUU | 840 |
| 34977 | HBV:265L17 (246C) v1 palindrome siRNA | ACCACGAGUCUAGACUCGUGGU | 841 |
| 34978 | HBV:265L17 (246C) v2 palindrome siRNA | ACCACGAGUCUAGACUCGUGGUTT | 842 |
| 35027 | TGFBR1:408L19 (390C) palindrome siRNA | AGUUCUAUUUUAUUGCAAUAAAAUAGAACU | 843 |
| 35028 | TGFBR1:406L17 (390C) palindrome siRNA | UUCUAUUUUAUUGCAAUAAAAUAGAA | 844 |
| 35029 | TGFBR1:799L19 (781C) palindrome siRNA | CGAACGUUCUUCUCUAGAGAAGAACGUUCG | 845 |
| 35030 | TGFBR1:797L17 (781C) palindrome siRNA | AACGUUCUUCUCUAGAGAAGAACGUU | 846 |
| 35031 | TGFBR1:797L19 (779C) v1 palindrome | AACGUUCUUCUCUAGAGGAAAGAACGUU | 847 |
| | siRNA | | |
| 35032 | TGFBR1:1353L19 (1335C) palindrome siRNA | AGUUGGUAAUCUUCAUGAAGAUUACCAACU | 848 |
| 35033 | TGFBR1:1641L19 (1623C) palindrome siRNA | AAACCCAGGAGCAGAUCUGCUCCUGGGUUU | 849 |
| 35034 | TGFBR1:178L19 (160C) palindrome siRNA | UAACGCCGUCGCCCCCGGGGGCGACGGCGUUA | 850 |
| 35035 | TGFBR1:215L19 (197C) palindrome siRNA | UAAAAUUGUCUUUUGUACAAAAGACAAUUUUA | 851 |
| 35036 | TGFBR1:213L17 (197C) v1 palindrome | AAAUUGUCUUUUGUACAGAAGACAAUUUUA | 852 |
| | siRNA | | |
| 35037 | mTGFBR1:3964L19 (3946C) palindrome | AUUACAUAGAAAUAUUUCUAUGUAAU | 853 |
| | siRNA | | |
| 35038 | mTGFBR1:2576L19 (2558C) palindrome | AAACACUGCUUUGAUCAAAAGCAGUGUUU | 854 |
| | siRNA | | |
| 35039 | mTGFBR1:2927L19 (2909C) palindrome | UCUACUCAGAAUAGCUAUUCUGAGUAGA | 855 |
| | siRNA | | |
| 35040 | mTGFBR1:3955L19 (3937C) palindrome | AAAUAUUUCUCUAAUUAGAGAAAUAUUU | 856 |
| | siRNA | | |
| 35041 | mTGFBR1:5558L19 (5540C) palindrome | UACACAUACAAUGUACAUUGUAUGUGUA | 857 |
| | siRNA | | |
| 35042 | mTGFBR1:934L19 (916C) palindrome siRNA | UGUGGACAGAGCAAGCUUGCUCUGUCCACA | 858 |
| 35043 | mTGFBR1:1929L19 (1911C) palindrome | AACCAAGGAAACACUAGUGUUUCCUUGGUU | 859 |
| | siRNA | | |
| 35044 | mTGFBR1:2063L19 (2045C) palindrome | UGUGAAGGAGCUGUGCACAGCUCCUUCACA | 860 |
| | siRNA | | |
| 35045 | mTGFBR1:2887L19 (2869C) palindrome | CAACGUGGCACUGAAUUCAGUGCCACGUUG | 861 |
| | siRNA | | |
| 35046 | mTGFBR1:2886L18 (2869C) palindrome | AACGUGGCACUGAAUUCAGUGCCACGUU | 862 |
| | siRNA | | |
| 35047 | mTGFBR1:3437L19 (3419C) palindrome | ACAUUGAUGAAAUCAUGAUUUCAUCAAUGU | 863 |
| | siRNA | | |
| 35048 | mTGFBR1:3684L19 (3666C) palindrome | AAACCCAUUUCCUUGCAAGGAAAUGGGUUU | 864 |
| | siRNA | | |
| 35191 | HBV:243U20c + HBV:263U21 stab00 | UGUCUCAGAUCUGAGCACCA GGACUUCUCUCAAUUUUCUTT | 865 |
| | siRNA | | |
| 35192 | HBV:245U18c + HBV:263U21 stab00 | UCUCAGAUCUGAGCACCA GGACUUCUCUCAAUUUUCUTT | 866 |
| | siRNA | | |
| 35193 | HBV:247U16c + HBV:263U21 stab00 | UCAGAUCUGAGCACCA GGACUUCUCUCAAUUUUCUTT | 867 |
| | siRNA | | |
| 35194 | HBV:249U14c + HBV:263U21 stab00 | AGAUCUGAGCACCA GGACUUCUCUCAAUUUUCUTT | 868 |
| | siRNA | | |
| 35195 | HBV:250U13c + HBV:263U21 stab00 | GAUCUGAGCACCA GGACUUCUCUCAAUUUUCUTT | 869 |
| | siRNA | | |
| 34196 | HBV:251U12c + HBV:263U21 stab00 siRNA | AUCUGAGCACCA GGACUUCUCUCAAUUUUCUTT | 870 |
| 35197 | HBV:252U11c + HBV:263U21 stab00 siRNA | UCUGAGCACCA GGACUUCUCUCAAUUUUCUTT | 871 |
| 35198 | HBV:253U10c + HBV:263U21 stab00 siRNA | CUGAGCACCA GGACUUCUCUCAAUUUUCUTT | 872 |
| 35199 | HBV:254U9c + HBV:263U21 stab00 siRNA | UGAGCACCA GGACUUCUCUCAAUUUUCUTT | 873 |
| 35200 | HBV:255U8c + HBV:263U21 stab00 siRNA | GAGCACCA GGACUUCUCUCAAUUUUCUTT | 874 |
| 35201 | HBV:256U7c + HBV:263U21 stab00 siRNA | AGCACCA GGACUUCUCUCAAUUUUCUTT | 875 |
| 35202 | HBV:257U6c + HBV:263U21 stab00 siRNA | GCACCA GGACUUCUCUCAAUUUUCUTT | 876 |
| 35203 | HBV:258U5c + HBV:263U21 stab00 siRNA | CACCA GGACUUCUCUCAAUUUUCUTT | 877 |
| 35204 | HBV:259U4c + HBV:263U21 stab00 siRNA | ACCA GGACUUCUCUCAAUUUUCUTT | 878 |
| 35205 | HBV:260U3c + HBV:263U21 stab00 siRNA | CCA GGACUUCUCUCAAUUUUCUTT | 879 |
| 35206 | HBV:261U2c + HBV:263U21 stab00 siRNA | CA GGACUUCUCUCAAUUUUCUTT | 880 |
| 35207 | HBV:262U1c + HBV:263U21 stab00 siRNA | A GGACUUCUCUCAAUUUUCUTT | 881 |
| 35208 | HBV:281L21 + HBV:262L20 stab00 siRNA | AGAAAAUUGAGAGAAGUCC UGGUGCUCAGAUCUGAGACATT | 882 |
| 35209 | HBV:281L21 (263C) + HBV:262L18r | AGAAAAUUGAGAGAAGUCC UGGUGCUCAGAUCUGAGATT | 883 |
| | stab00 siRNA | | |
| 35210 | HBV:281L21 (263C) + HBV:262L16r | AGAAAAUUGAGAGAAGUCC UGGUGCUCAGAUCUGATT | 884 |
| | stab00 siRNA | | |
| 35211 | HBV:281L21 (263C) + HBV:262L14r | AGAAAAUUGAGAGAAGUCC UGGUGCUCAGAUCUTT | 885 |
| | stab00 siRNA | | |
| 35212 | HBV:281L21 (263C) + HBV:262L13r | AGAAAAUUGAGAGAAGUCC UGGUGCUCAGAUCTT | 886 |
| | stab00 siRNA | | |
| 35213 | HBV:281L21 (263C) + HBV:262L12r | AGAAAAUUGAGAGAAGUCC UGGUGCUCAGAUTT | 887 |
| | stab00 siRNA | | |
| 35214 | HBV:281L21 (263C) + HBV:262L11r | AGAAAAUUGAGAGAAGUCC UGGUGCUCAGATT | 888 |
| | stab00 siRNA | | |
| 35215 | HBV:281L21 (263C) + HBV:262L10r | AGAAAAUUGAGAGAAGUCC UGGUGCUCAGTT | 889 |
| | stab00 siRNA | | |
| 35216 | HBV:281L21 (263C) + HBV:262L9r | AGAAAAUUGAGAGAAGUCC UGGUGCUCATT | 890 |
| | stab00 siRNA | | |
| 35217 | HBV:281L21 (263C) + HBV:262L8r | AGAAAAUUGAGAGAAGUCC UGGUGCUCTT | 891 |
| | stab00 siRNA | | |
| 35218 | HBV:281L21 (263C) + HBV:262L7r | AGAAAAUUGAGAGAAGUCC UGGUGCUTT | 892 |
| | stab00 siRNA | | |
| 35219 | HBV:281L21 (263C) + HBV:262L6r | AGAAAAUUGAGAGAAGUCC UGGUGCTT | 893 |
| | stab00 siRNA | | |
| 35220 | HBV:281L21 (263C) + HBV:262L5r | AGAAAAUUGAGAGAAGUCC UGGUGTT | 894 |
| | stab00 siRNA | | |
| 35221 | HBV:281L21 (263C) + HBV:262L4r | AGAAAAUUGAGAGAAGUCC UGGUTT | 895 |
| | stab00 siRNA | | |
| 35222 | HBV:281L21 (263C) + HBV:262L3r | AGAAAAUUGAGAGAAGUCC UGGTT | 896 |
| | stab00 siRNA | | |
| 35223 | HBV:281L21 (263C) + HBV:262L2r | AGAAAAUUGAGAGAAGUCC UGTT | 897 |
| | stab00 siRNA | | |
| 35224 | HBV:281L21 (263C) + HBV:262L1r | AGAAAAUUGAGAGAAGUCC UTT | 898 |
| | stab00 siRNA | | |
| 35225 | HCVa:327 siRNA stab0/0 Pal01 | GGUCUACGAGACCUCCCGG CCGGGAGGUCUCGUAGACC | 899 |
| 35226 | HCVa:327 siRNA stab0/0 Pal02 | GGUCUACGAGACCUCCCGG CCGGGAGGUCUCGUAGACCTT | 900 |
| 35227 | HCVa:327 siRNA stab0/0 Pal03 | GGUCUACGAGACCUCCCG CGGGAGGUCUCGUAGACC | 901 |
| 35228 | HCVa:327 siRNA stab0/0 Pal04 | GGUCUACGAGACCUCCCG CGGGAGGUCUCGUAGACCTT | 902 |
| 35229 | HCVa:327 siRNA stab0/0 Pal05 | GGUCUACGAGACCUCCC GGGAGGUCUCGUAGACC | 903 |
| 35230 | HCVa:327 siRNA stab0/0 Pal06 | GGUCUACGAGACCUCCC GGGAGGUCUCGUAGACCTT | 904 |
| 35231 | HCVa:327 siRNA stab0/0 Pal07 | GGUCUACGAGACCUCC GGAGGUCUCGUAGACC | 905 |
| 35232 | HCVa:327 siRNA stab0/0 Pal08 | GGUCUACGAGACCUCC GGAGGUCUCGUAGACCTT | 906 |
| 35235 | HCVa:327 siRNA stab0/0 Pal011 | GUCUACAGACCUCCCGG GAGGUCUCGUAGAC | 907 |
| 35236 | HCVa:327 siRNA stab0/0 Pal12 | GUCUACGAGACCUCCCGG GAGGUCUCGUAGACTT | 908 |
| 35237 | HCVa:327 siRNA stab0/0 Pal13 | UCUACGAGACCUCCCGG GAGGUCUCGUAGA | 909 |
| 35238 | HCVa:327 siRNA stab0/0 Pal14 | UCUACGAGACCUCCCGG GAGGUCUCGUAGATT | 910 |
| 35239 | HCVa:327 siRNA stab0/0 Pal15 | CUACGAGACCUCCCGG GAGGUCUCGUAG | 911 |
| 35240 | HCVa:327 siRNA stab0/0 Pal16 | CUACGAGACCUCCCGG GAGGUCUCGUAGTT | 912 |
| 35241 | HCVa:327 siRNA stab0/0 Pal17 | GGUCUACGAGACCUCCAGG UCUCGUAGACC | 913 |
| 35242 | HCVa:327 siRNA stab0/0 Pal18 | GGUCUACGAGACCUCCAGG UCUCGUAGACCTT | 914 |
| 35243 | HCVa:327 siRNA stab0/0 Pal19 | GGUCUACGAGACCUCGAGG UCUCGUAGACTT | 916 |
| 35244 | HCVa:327 siRNA stab0/0 Pal20 | GGUCUACGAGACCUCGAGG UCUCGUAGACCTT | 916 |
| 35245 | HCVa:327 siRNA stab0/0 Pal21 | GGUCUACGAGACCUGCAGG UCUCGUAGACC | 917 |
| 35246 | HCVa:327 siRNA stab0/0 Pal22 | GGUCUACGAGACCUGCAGG UCUCGUAGACCTT | 918 |
| 35247 | HCVa:304 SiRNA stab0/0 Pal01 | GACUAUCCCACGAACGCUC GAGCGUUCGUGGGAUAGUCTT | 919 |
| 35248 | HCVa:304 siRNA stab0/0 Pal02 | GACUAUCCCACGAACGCUC GAGCGUUCGUGGGAUAGUC | 920 |
| 35249 | HCVa:304 siRNA stab0/0 Pal03 | GACUAUCCCACGAACGCGU UCGUGGGAUAGUCTT | 921 |
| 35250 | HCVa:304 siRNA stab0/0 Pal04 | GACUAUCCCACGAACGCGU UCGUGGGAUAGUC | 922 |
| 35251 | HCVa:304 siRNA stab0/0 Pal05 | GACUAUCCCACGAACGUUC GUGGGAUAGUCTT | 923 |
| 35252 | HCVa:304 siRNA stab0/0 Pal06 | GACUAUCCCACGAACGUUC GUGGGAUAGUC | 924 |
| 35253 | HCVa:304 siRNA stab0/0 Pal07 | ACUAUCCCACGAACGUUC GUGGGAUAGUTT | 925 |
| 35254 | HCVa:304 siRNA stab0/0 Pal08 | ACUAUCCCACGAACGUUC GUGGGA | 926 |
| 35295 | Luc3/rLuc bf-1a siRNA [Luc3:98L19 | UAUCUCUUCAUAGCCUUAUUGGUAUGGGCAAA | 927 |
| | (80C) − 6 + rLuc:231U19] | | |
| 35296 | Luc3/rLuc bf-2a siRNA [Luc3:1562L19 | UCGUCCACAAACACAACUCUUCUUAUUUAUGGCGA | 928 |
| | (1544C) − 3 + rLuc:165U19] | | |
| 35297 | Luc3/rLuc bf-3a siRNA | CAACGAUGAAGAAGUGUUCUUGAUUCAUUUAUU | 929 |
| | [Luc3:1306L19 + rLuc:84U19] | | |
| 35298 | Luc3/rLuc bf-4a siRNA | ACGCGCCCAACACCGGCAUUUCAUUAUAGCUAU | 930 |
| | [Luc3:286L19 − 5 + | | |
| | rLuc:375U19] | | |
| 35299 | Luc3/rLuc bf-5a siRNA Luc3:98L19 | UAUCUCUUCAUAGCCUUAU UGUUCUUGAUUCAUUUAUU | 931 |
| | (80C) + rLuc:84U19] | | |
| 35300 | Luc3/rLuc bf-6a siRNA [Luc3:98L19 | UAUCUCUUCAUAGCCUU UUCUUGAUUCAUUUAUU | 932 |
| | (80C) − 4 + rLuc:84U19] | | |
| 35301 | Luc3/rLuc bf-7a siRNA [Luc3:98L19 | UAUCUCUUCAUAGCCUUAU GGCAUUUCAUUAUAGCUAU | 933 |
| | (80C) + rLuc:375U19] | | |
| 35302 | Luc3/rLuc bf-8a siRNA [Luc3:1562L19 | UCGUCCACAAACACAACUC UGUUCUUGAUUCAUUUAUU | 934 |
| | (1544C) + rLuc:84U19] | | |
| 35303 | Luc3/rLuc bf-9a siRNA [Luc3:1562L19 | UCGUCCACAAACACAAC UUCUUGUUCAUUUAUU | 935 |
| | (1544C) − 4 + rLuc:84U19] | | |
| 35304 | Luc3/rLuc bf-10a siRNA [Luc3:1562L19 | UCGUCCACAAACACAACUC GGCAUUUCAUUAUAGCUAU | 936 |
| | (1544C) − 4 + rLuc:375U19] | | |
| 35305 | Luc3/rLuc bf-1b siRNA [rLuc3:249L19 | UUUGCCCAUACCAAUAAGGCUAUGAAGAGAUA | 937 |
| | (231C) − 6 + rLuc3:80U19] | | |
| 35306 | Luc3/rLuc bf-2b siRNA [rLuc:183L19 | UCGCCAUAAAUAAGAAGAGUUGUGUUUGUGGACGA | 938 |
| | (165C) − 3 + Luc3:1544U19] | | |
| 35307 | Luc3/rLuc bf-3b siRNA [rLuc:102L19 | AAUAAAUGAAUCAAGAACACUUCUUCAUCGUUG | 939 |
| | (84C) − 5 + Luc3:1288U19] | | |
| 35308 | Luc3/rLuc bf-4b siRNA [rLuc:393L19 | AUAGCUAUAAUGAAAUGCCGGUGUUGGGCGCGU | 940 |
| | (375C) − 5 + Luc3:268U19] | | |
| 35309 | Luc3/rLuc bf-5b siRNA [rLuc:102L19 | AAUAAAUGAAUCAAGAACA AUAAGGCUAUGAAGAGAUA | 941 |
| | (84C) + Luc3:80U19] | | |
| 35310 | Luc3/rLuc bf-6b siRNA [rLuc:102L19 | AAUAAAUGAAUCAAGAA AAGGCUAUGAAGAGAUA | 942 |
| | (84C) − 4 + Luc3:80U19] | | |
| 35311 | Luc3/rLuc bf-7b siRNA [rLuc:393L19 | AUAGCUAUAAUGAAAUGCC AUAAGGCUAUGAAGAGAUA | 943 |
| | (375C) + Luc3:80U19] | | |
| 35312 | Luc3/rLuc bf-8b siRNA [rLuc:102L19 | AAUAAAUGAAUCAAGAACA GAGUUGUGUUUGUGGACGA | 944 |
| | (84C) + Luc3:1544U19] | | |
| 35313 | Luc3/rLuc bf-9b siRNA [rLuc:102L19 | AAUAAAUGAAUCAAGAA GUUGUGUUUGUGGACGA | 945 |
| | (84C) − 4 + Luc3:1544U19] | | |
| 35314 | Luc3/rLuc bf-10b siRNA [rLuc:393L19 | AUAGCUAUAAUGAAAUGCC GAGUUGUGUUUGUGGACGA | 946 |
| | (375C) + Luc3:1544U19] | | |
| 35913 | PRKCA:1143U21 siRNA stab00 | GGAUGUGGUGAUUCAGGAUTT | 947 |
| 36002 | VEGF:162U21 siRNA stab00 (sense) | CCUCUUCUUUUUUCUUAAATT | 948 |
| 36003 | VEGF:163U21 siRNA stab00 (sense) | CUCUUCUUUUUUCUUAAACTT | 949 |
| 36004 | VEGF:164U21 siRNA stab00 (sense) | UCUUCUUUUUUCUUAAACATT | 950 |
| 36005 | VEGF:166U21 siRNA stab00 (sense) | UCUUUUUUCUUAAACAUUTT | 951 |
| 36006 | VEGF:169U21 siRNA stab00 (sense) | UUUUUUCUUAAACAUUUUUTT | 952 |
| 36007 | VEGF:171U21 siRNA stab00 (sense) | UUUUCUUAAACAUUUUUUUTT | 953 |
| 36008 | VEGF:172U21 siRNA stab00 (sense) | UUUCUUAAACAUUUUUUUUTT | 954 |
| 36009 | VEGF:181U21 siRNA stab00 (sense) | CAUUUUUUUUUAAAACUGUTT | 955 |
| 36010 | VEGF:187U21 siRNA stab00 (sense) | UUUUUAAAACUGUAUUGUUTT | 956 |
| 36011 | VEGF:188U21 siRNA stab00 (sense) | UUUUAAAACUGUAUUGUUUTT | 957 |
| 36012 | VEGF:192U21 siRNA stab00 (sense) | AAAACUGUAUUGUUUCUCGTT | 958 |
| 36013 | VEGF:202U21 siRNA stab00 (sense) | UGUUUCUCGUUUUAAUUUATT | 959 |
| 36014 | VEGF:220U21 siRNA stab00 (sense) | AUUUUUGCUUGCCAUUCCCTT | 960 |
| 36015 | VEGF:237U21 siRNA stab00 (sense) | CCCACUUGAAUCGGGCCGATT | 961 |
| 36016 | VEGF:238U21 siRNA stab00 (sense) | CCACUUGAAUCGGGCCGACTT | 962 |
| 36017 | VEGF:338U21 siRNA stab00 (sense) | CCAGAGAGAAGUCGAGGAATT | 963 |
| 36018 | VEGF:339U21 siRNA stab00 (sense) | CAGAGAGAAGUCGAGGAAGTT | 964 |
| 36019 | VEGF:371U21 siRNA stab00 (sense) | CAGAGAGAGCGCGCGGGCGTT | 965 |
| 36020 | VEGF:484U21 siRNA stab00 (sense) | AGCUGACCAGUCGCGCUGATT | 966 |
| 36021 | VEGF:598U21 siRNA stab00 (sense) | CCGGAGCCCGCGCCCGGAGTT | 967 |
| 36022 | VEGF:599U21 siRNA stab00 (sense) | CGGAGCCCGCGCCCGGAGGTT | 968 |
| 36023 | VEGF:600U21 siRNA stab00 (sense) | GGAGCCCGCGCCCGGAGGCTT | 969 |
| 36024 | VEGF:652U21 siRNA stab00 (sense) | CUGAAACUUUUCGUCCAACTT | 970 |
| 36025 | VEGF:653U21 siRNA stab00 (sense) | UGAAACUUUUCGUCCAACUTT | 971 |
| 36026 | VEGF:654U21 siRNA stab00 (sense) | GAAACUUUUCGUCCAACUUTT | 972 |
| 36027 | VEGF:658U21 siRNA stab00 (sense) | CUUUUCGUCCAACUUCUGGTT | 973 |
| 36028 | VEGF:672U21 siRNA stab00 (sense) | UCUGGGCUGUUCUCGCUUCTT | 974 |
| 36029 | VEGF:674U21 siRNA stab00 (sense) | UGGGCUGUUCUCGCUUCGGTT | 975 |
| 36030 | VEGF:691U21 siRNA stab00 (sense) | GGAGGAGCCGUGGUCCGCGTT | 976 |
| 36031 | VEGF:692U21 siRNA stab00 (sense) | GAGGAGCCGUGGUCCGCGCTT | 977 |
| 36032 | VEGF:758U21 siRNA stab00 (sense) | GGGAGGAGCCGCAGCCGGATT | 978 |
| 36033 | VEGF:759U21 siRNA stab00 (sense) | GGAGGAGCCGCAGCCGGAGTT | 979 |
| 36034 | VEGF:760U21 siRNA stab00 (sense) | GAGGAGCCGCAGCCGGAGGTT | 980 |
| 36035 | VEGF:795U21 siRNA stab00 (sense) | AGAGAAGGAAGAGGAGAGGTT | 981 |
| 36036 | VEGF:886U21 siRNA stab00 (sense) | GCUCCAGCCGCGCGCGCUCTT | 982 |
| 36037 | VEGF:977U21 siRNA stab00 (sense) | CCCACAGCCCGAGCCGGAGTT | 983 |
| 36038 | VEGF:978U21 siRNA stab00 (sense) | CCACAGCCCGAGCCGGAGATT | 984 |
| 36039 | VEGF:1038U21 siRNA stab00 (sense) | CAUGAACUUUCUGCUGUCUTT | 985 |
| 36040 | VEGF:1043U21 siRNA stab00 (sense) | ACUUUCUGCUGUCUUGGGUTT | 986 |
| 36041 | VEGF:1049U21 siRNA stab00 (sense) | UGCUGUCUUGGGUGCAUUGTT | 987 |
| 36042 | VEGF:1061U21 siRNA stab00 (sense) | UGCAUUGGAGCCUUGCCUUTT | 988 |
| 36043 | VEGF:1072U21 siRNA stab00 (sense) | CUUGCCUUGCUGCUCUACCTT | 989 |
| 36044 | VEGF:1088U21 siRNA stab00 (sense) | ACCUCCACCAUGCCAAGUGTT | 990 |
| 36045 | VEGF:1089U21 siRNA stab00 (sense) | CCUCCACCAUGCCAAGUGGTT | 991 |
| 36046 | VEGF:1095U21 siRNA stab00 (sense) | CCAUGCCAAGUGGUCCCAGTT | 992 |
| 36047 | VEGF:1110U21 siRNA stab00 (sense) | CCAGGCUGCACCCAUGGCATT | 993 |
| 36048 | VEGF:1175U21 siRNA stab00 (sense) | UCUAUCAGCGCAGCUACUGTT | 994 |
| 36049 | VEGF:1220U21 siRNA stab00 (sense) | UCUUCCAGGAGUACCCUGATT | 995 |
| 36050 | VEGF:1253U21 siRNA stab00 (sense) | UCUUCAAGCCAUCCUGUGUTT | 996 |
| 36051 | VEGF:1300U21 siRNA stab00 (sense) | AAUGACGAGGGCCUGGAGUTT | 997 |
| 36052 | VEGF:1309U21 siRNA stab00 (sense) | GGCCUGGAGUGUGUGCCCATT | 998 |
| 36053 | VEGF:1326U21 siRNA stab00 (sense) | CAGCACAACAAAUGUGAAUTT | 999 |
| 36054 | VEGF:1338U21 siRNA stab00 (sense) | CAACAUCACCAUGCAGAUUTT | 1000 |
| 36055 | VEGF:1342U21 siRNA stab00 (sense) | AUCACCAUGCAGAUUAUGCTT | 1001 |
| 36056 | VEGF:1351U21 siRNA stab00 (sense) | CAGAUUAUGCGGAUCAAACTT | 1002 |
| 36057 | VEGF:1352U21 siRNA stab00 (sense) | AGAUUAUGCGGAUCAAACCTT | 1003 |
| 36058 | VEGF:1353U21 siRNA stab00 (sense) | GAUUAUGCGGAUCAAACCUTT | 1004 |
| 36059 | VEGF:1389U21 siRNA stab00 (sense) | AGGAGAGAUGAGCUUCCUATT | 1005 |
| 36060 | VEGF:1398U21 siRNA stab00 (sense) | GAGCUUCCUACAGCACAACTT | 1006 |
| 36061 | VEGF:1401U21 siRNA stab00 (sense) | CUUCCUACAGCACAACAAATT | 1007 |
| 36062 | VEGF:1407U21 siRNA stab00 (sense) | ACAGCACAACAAAUGUGAATT | 1008 |
| 36063 | VEGF:1408U21 siRNA stab00 (sense) | CAGCACAACAAAUGUGAAUTT | 1009 |
| 36064 | VEGF:1417U21 sRNA stab00 (sense) | AAAUGUGAAUGCAGACCAATT | 1010 |
| 36065 | VEGF:180L21 siRNA (162C) stab00 | UUUAAGAAAAAAGAAGAGGTT | 1011 |
| | (antisense) | | |
| 36066 | VEGF:181L21 siRNA (163C) stab00 | GUUUAAGAAAAAAGAAGAGTT | 1012 |
| | (antisense) | | |
| 36067 | VEGF:182L21 siRNA (164C) stab00 | UGUUUAAGAAAAAAGAAGATT | 1013 |
| | (antisense) | | |
| 36068 | VEGF:184L21 siRNA (166C) stab00 | AAUGUUUAAGAAAAAAGAATT | 1014 |
| | (antisense) | | |
| 36069 | VEGF:187L21 siRNA (169C) stab00 | AAAAAUGUUUAAGAAAAAATT | 1015 |
| | (antisense) | | |
| 36070 | VEGF:189L21 siRNA (171C) stab00 | AAAAAAAUGUUUAAGAAAATT | 1016 |
| | (antisense) | | |
| 36071 | VEGF:190L21 siRNA (172C) stab00 | AAAAAAAAUGUUUAAGAAATT | 1017 |
| | (antisense) | | |
| 36072 | VEGF:199L21 siRNA (181C) stab00 | ACAGUUUUAAAAAAAAAUGTT | 1018 |
| | (antisense) | | |
| 36073 | VEGF:205L21 siRNA (187C) stab00 | AACAAUACAGUUUUAAAAATT | 1019 |
| | (antisense) | | |
| 36074 | VEGF:206L21 siRNA (188C) stab00 | AAACAAUACAGUUUUAAAATT | 1020 |
| | (antisense) | | |
| 36075 | VEGF:210L21 siRNA (192C) stab00 | CGAGAAACAAUACAGUUUUTT | 1021 |
| | (antisense) | | |
| 36076 | VEGF:220L21 siRNA (202C) stab00 | UAAAUUAAAACGAGAAACATT | 1022 |
| | (antisense) | | |
| 36077 | VEGF:238L21 siRNA (220C) stab00 | GGGAAUGGCAAGCAAAAAUTT | 1023 |
| | (antisense) | | |
| 36078 | VEGF:255L21 siRNA (237C) stab00 | UCGGCCCGAUUCAAGUGGGTT | 1024 |
| | (antisense) | | |
| 36079 | VEGF:256L21 siRNA (238C) stab00 | GUCGGCCCGAUUCAAGUGGTT | 1025 |
| | (antasense) | | |
| 36080 | VEGF:356L21 siRNA (338C) stab00 | UUCCUCGACUUCUCUCUGGTT | 1026 |
| | (antisense) | | |
| 36081 | VEGF:357L21 siRNA (339C) stab00 | CUUCCUCGACUUCUCUCUGTT | 1027 |
| | (antisense) | | |
| 36082 | VEGF:389L21 siRNA (371C) stab00 | CGCCCGCGCGCUCUCUCUGTT | 1028 |
| | (antisense) | | |
| 36083 | VEGF:502L21 siRNA (484C) stab00 | UCAGCGCGACUGGUCAGCUTT | 1029 |
| | (antisense) | | |
| 36084 | VEGF:616L21 siRNA (598C) stab00 | CUCCGGGCGCGGGCUCCGGTT | 1030 |
| | (antisense) | | |
| 36085 | VEGF:617L21 siRNA (599C) stab00 | CCUCCGGGCGCGGGCUCCGTT | 1031 |
| | (antisense) | | |
| 36086 | VEGF:618L21 siRNA (600C) stab00 | GCCUCCGGGCGCGGGCUCCTT | 1032 |
| | (antisense) | | |
| 36087 | VEGF:670L21 siRNA (652C) stab00 | GUUGGACGAAAAGUUUCAGTT | 1033 |
| | (antisense) | | |
| 36088 | VEGF:671L21 siRNA (653C) stab00 | AGUUGGACGAAAAGUUUCATT | 1034 |
| | (antisense) | | |
| 36089 | VEGF:672L21 siRNA (654C) stab00 | AAGUUGGACGAAAAGUUUCTT | 1035 |
| | (antisense) | | |
| 36090 | VEGF:676L21 siRNA (658C) stab00 | CCAGAAGUUGGACGAAAAGTT | 1036 |
| | (antisense) | | |
| 36091 | VEGF:690L21 siRNA (672C) stab00 | GAAGCGAGAACAGCCCAGATT | 1037 |
| | (antisense) | | |
| 36092 | VEGF:692L21 siRNA (674C) stab00 | CCGAAGCGAGAACAGCCCATT | 1038 |
| | (antisense) | | |
| 36093 | VEGF:709121 siRNA (691C) stab00 | CGCGGACCACGGCUCCUCCTT | 1039 |
| | (antisense) | | |
| 36094 | VEGF:710L21 siRNA (692C) stab00 | GCGCGGACCACGGCUCCUCTT | 1040 |
| | (antisense) | | |
| 36095 | VEGF:776L21 siRNA (758C) stab00 | UCCGGCUGCGGCUCCUCCCTT | 1041 |
| | (antisense) | | |
| 36096 | VEGF:777L21 SiRNA (759C) stab00 | CUCCGGCUGCGGCUCCUCCTT | 1042 |
| | (antisense) | | |
| 36097 | VEGF:778L21 siRNA (760C) stab00 | CCUCCGGCUGCGGCUCCUCTT | 1043 |
| | (antisense) | | |
| 36098 | VEGF:813L21 siRNA (795C) stab00 | CCUCUCCUCUUCCUUCUCUTT | 1044 |
| | (antisense) | | |
| 36099 | VEGF:904L21 siRNA (886C) stab00 | GAGCGCGCGCGGCUGGAGCTT | 1045 |
| | (antisense) | | |
| 36100 | VEGF:995L21 siRNA (977C) stab00 | CUCCGGCUCGGGCUGUGGGTT | 1046 |
| | (antisense) | | |
| 36101 | VEGF:996L21 siRNA (978C) stab00 | UCUCCGGCUCGGGCUGUGGTT | 1047 |
| | (antisense) | | |
| 36102 | VEGF:1056L21 siRNA (1038C) stab00 | AGACAGCAGAAAGUUCAUGTT | 1048 |
| | (antisense) | | |
| 36103 | VEGF:1061L21 siRNA (1043C) stab00 | ACCCAAGACAGCAGAAAGUTT | 1049 |
| | (antisense) | | |
| 36104 | VEGF:1067L21 siRNA (1049C) stab00 | CAAUGCACCCAAGACAGCATT | 1050 |
| | (antisense) | | |
| 36105 | VEGF:1079L21 siRNA (1061C) stab00 | AAGGCAAGGCUCCAAUGCATT | 1051 |
| | (antisense) | | |
| 36106 | VEGF:1090L21 siRNA (1072C) stab00 | GGUAGAGCAGCAAGGCAAGTT | 1052 |
| | (antisense) | | |
| 36107 | VEGF:1106L21 siRNA (1088C) stab00 | CACUUGGCAUGGUGGAGGUTT | 1053 |
| | (antisense) | | |
| 36108 | VEGF:1107L21 siRNA (1089C) stab00 | CCACUUGGCAUGGUGGAGGTT | 1054 |
| | (antisense) | | |
| 36109 | VEGF:1113L21 siRNA (1095C) stab00 | CUGGGACCACUUGGCAUGGTT | 1055 |
| | (antisense) | | |
| 36110 | VEGF:1128L21 siRNA (1110C) stab00 | UGCCAUGGGUGCAGCCUGGTT | 1056 |
| | (antisense) | | |
| 36111 | VEGF:1193L21 siRNA (1175C) stab00 | CAGUAGCUGCGCUGAUAGATT | 1057 |
| | (antisense) | | |
| 36112 | VEGF:1238L21 siRNA (1220C) stab00 | UCAGGGUACUCCUGGAAGATT | 1058 |
| | (antisense) | | |
| 36113 | VEGF:1271L21 siRNA (1253C) stab00 | ACACAGGAUGGCUUGAAGATT | 1059 |
| | (antisense) | | |
| 36114 | VEGF:1318L21 siRNA (1300C) stab00 | ACUCCAGGCCCUCGUCAUUTT | 1060 |
| | (antisense) | | |
| 36115 | VEGF:1327L21 siRNA (1309C) stab00 | UGGGCACACACUCCAGGCCTT | 1061 |
| | (antisense) | | |
| 36116 | VEGF:1344L21 siRNA (1326C) stab00 | GAUGUUGGACUCCUCAGUGTT | 1062 |
| | (antisense) | | |
| 36117 | VEGF:1356L21 siRNA (1338C) stab00 | AAUCUGCAUGGUGAUGUUGTT | 1063 |
| | (antisense) | | |
| 36118 | VEGF:1360L21 siRNA (1342C) stab00 | GCAUAAUCUGCAUGGUGAUTT | 1064 |
| | (antisense) | | |
| 36119 | VEGF:1369L21 siRNA (1351C) stab00 | GUUUGAUCCGCAUAAUCUGTT | 1065 |
| | (antisense) | | |
| 36120 | VEGF:1370L21 siRNA (1352C) stab00 | GGUUUGAUCCGCAUAAUCUTT | 1066 |
| | (antisense) | | |
| 36121 | VEGF:1371L21 siRNA (1353C) stab00 | AGGUUUGAUCCGCAUAAUCTT | 1067 |
| | (antisense) | | |
| 36122 | VEGF:1407L21 siRNA (1389C) stab00 | UAGGAAGCUCAUCUCUCCUTT | 1068 |
| | (antisense) | | |
| 36123 | VEGF:1416L21 siRNA (1398C) stab00 | GUUGUGCUGUAGGAAGCUCTT | 1069 |
| | (antisense) | | |
| 36124 | VEGF:1419L21 siRNA (1401C) stab00 | UUUGUUGUGCUGUAGGAAGTT | 1070 |
| | (antisense) | | |
| 36125 | VEGF:1425121 siRNA (1407C) stab00 | UUCACAUUUGUUGUGCUGUTT | 1071 |
| | (antisense) | | |
| 36126 | VEGF:1426L21 siRNA (1408C) stab00 | AUUCACAUUUGUUGUGCUGTT | 1072 |
| | (antisense) | | |
| 36127 | VEGF:1435121 siRNA (1417C) stab00 | UUGGUCUGCAUUCACAUUUTT | 1073 |
| | (antisense) | | |
| 36408 | bf-L-03 siRNA stab00 [VEGF:1215U21 | GGACAUCUUCCAGGAGUACTT X GAACUGAGUUUAAAAGGCATT | 1074 |
| | o18S FLT1:346U21] | | |
| 36409 | bf-L-02 siRNA stab00 [VEGF:1421U21 | GUGAAUGCAGACCAAAGAATT X GAACUGAGUUUAAAAGGCATT | 1075 |
| | o18S FLT1:346U21] | | |
| 36410 | bf-L-23 siRNA stab00 [HBV:1583U21 | GCACUUCGCUUCACCUCUGTT X GGACUUCUCUCAAUUUUCUTT | 1076 |
| | o18S HBV:263U21] | | |
| 36411 | bf-L-04 siRNA stab00 [KDR:3854U21 | UGAGCAUGGAAGAGGAUUCTT X GAACUGAGUUUAAAAGGCATT | 1077 |
| | o18S FLT1:346U21] | | |
| 36412 | bf-L-12 siRNA stab00 [Luc3:468U21 | GGAUUACCAGGGAUUUCAGTT X AUAAGGCUAUGAAGAGAUATT | 1078 |
| | o18S Luc3:80U21] | | |
| 36413 | bf-L-10 siRNA stab00 [Luc3:1544U21 | GAGUUGUGUUUGUGGACGATT X AUAAGGCUAUGAAGAGAUATT | 1079 |
| | o18S Luc3:80U21] | | |
| 36414 | bf-L-21 siRNA stab00 [HCVa:327U21 | CCGGGAGGUCUCGUAGACCTT X GCGAAAGGCCUUGUGGUACTT | 1080 |
| | o18S HCVa:282U21] | | |
| 36415 | bf-L-22 siRNA stab00 [HCVa:327U21 | CCGGGAGGUCUCGUAGACCTTX AUAGGGUGCUUGCGAGUGCTT | 1081 |
| | o18S HCVa:307U21] | | |
| 36416 | bf-L-01 siRNA stab00 [FLT1:346U21 | GAACUGAGUUUAAAAGGCATT X GUGAAUGCAGACCAAAGAATT | 1082 |
| | o18S VEGF:1421U21] | | |
| 36417 | bf-L-15 siRNA stab00 [Luc3:1478U21 | UGACGGAAAAAGAGAUCGUTT X AUAAGGCUAUGAAGAGAUATT | 1083 |
| | o18S Luc3:80U21] | | |
| 36418 | bf-L-16 siRNA stab00 [Luc3:1478U21 | UGACGGAAAAAGAGAUCGUTT W AUAAGGCUAUGAAGAGAUATT | 1084 |
| | c12S Luc3:80U21] | | |
| 36419 | bf-L-17 siRNA stab00 [Luc3:1478U21 | UGACGGAAAAAGAGAUCGUTT Y AUAAGGCUAUGAAGAGAUATT | 1085 |
| | o9S Luc3:80U21] | | |
| 36420 | bf-L-18 siRNA stab00 [Luc3:1478U21 | UGACGGAAAAAGAGAUCGUTT Z AUAAGGCUAUGAAGAGAUATT | 1086 |
| | c3S Luc3:80U21] | | |
| 36421 | bf-L-19 siRNA stab00 [Luc3:1478U21 | UGACGGAAAAAGAGAUCGUTT XX AUAAGGCUAUGAAGAGAUATT | 1087 |
| | 2x o18S Luc3:80U21] | | |
| 36422 | bf-L-13 siRNA stab00 [Luc3:80U21 | AUAAGGCUAUGAAGAGAUATT X UGACGGAAAAAGAGAUCGUTT | 1088 |
| | o18S Luc3:1478U21] | | |
| 35423 | bf-L-14 siRNA stab00 [Luc3:237U21 | CGUAUGCAGUGAAAACUCUTT X UGACGGAAAAAGAGAUCGUTT | 1089 |
| | o18S Luc3:1478U21] | | |
| 36424 | bf-L-11 siRNA stab00 [Luc3:237U21 | CGUAUGCAGUGAAAACUCUTT X AUAAGGCUAUGAAGAGAUATT | 1090 |
| | o18S Luc3:80U21] | | |
| 36425 | bf-L-05 siRNA stab00 [FLT1:3646U21 | AUGCUGGACUGCUGGCACATT X GUGAAUGCAGACCAAAGAATT | 1091 |
| | o18S VEGF:1421U21] | | |
| 36426 | bf-L-06 siRNA stab00 [FLT1:3646U21 | AUGCUGGACUGCUGGCACATT W GUGAAUGCAGACCAAAGAATT | 1092 |
| | c12S VEGF:1421U21] | | |
| 36427 | bf-L-07 siRNA stab00 [FLT1:3646U21 | AUGCUGGACUGCUGGCACATT Y GUGAAUGCAGACCAAAGAATT | 1093 |
| | o9S VEGF:1421U21] | | |
| 36428 | bf-L-08 siRNA stab00 [FLT1:3646U21 | AUGCUGGACUGCUGGCACATT Z GUGAAUGCAGACCAAAGAATT | 1094 |
| | c3S VEGF:1421U21] | | |
| 36429 | bf-L-09 siRNA stab00 [FLT1:3546U21 | AUGCUGGACUGCUGGCACATT XX GUGAAUGCAGACCAAAGAATT | 1095 |
| | 2x o18S VEGF:1421U21] | | |
| 36430 | bf-L-20 siRNA stab00 [HCVa:307U21 | AUAGGGUGCUUGCGAGUGCTT X GCGAAAGGCCUUGUGGUACTT | 1096 |
| | o18S HCVa:282U21] | | |
| 36431 | FLT1:346U21 siRNA stab00 (sense) | GAACUGAGUUUAAAAGGCATT | 1097 |
| 36432 | Luc3:80U21 siRNA stab00 (sense) | AUAAGGCUAUGAAGAGAUATT | 1098 |
| 36433 | Luc3:1478U21 siRNA stab00 (sense) | UGACGGAAAAAGAGAUCGUTT | 1099 |
| 36434 | Luc3:1544U21 siRNA stab00 (sense) | GAGUUGUGUUUGUGGACGATT | 1100 |
| 36435 | Luc3:237U21 siRNA stab00 (sense) | CGUAUGCAGUGAAAACUCUTT | 1101 |
| 36436 | Luc3:468U21 siRNA stab00 (sense) | GGAUUACCAGGGAUUUCAGTT | 1102 |
| 36437 | HCVa:282U21 siRNA stab00 (sense) | GCGAAAGGCCUUGUGGUACTT | 1103 |
| 36438 | HCVa:307U21 siRNA stab00 (sense) | AUAGGGUGCUUGCGAGUGCTT | 1104 |
| 36439 | FLT1:364L21 siRNA (346C) stab00 | UGCCUUUUAAACUCAGUUCTT | 1105 |
| | (antisense) | | |
| 36440 | Luc3:98L21 siRNA (80C) stab00 | UAUCUCUUCAUAGCCUUAUTT | 1106 |
| | (antisense) | | |
| 36441 | Luc3:1496L21 siRNA (1478C) stab00 | ACGAUCUCUUUUUCCGUCATT | 1107 |
| | (antisense) | | |
| 36442 | Luc3:1562L21 siRNA (1544C) stab00 | UCGUCCACAAACACAACUCTT | 1108 |
| | (antisense) | | |
| 36443 | Luc3:255L21 siRNA (237C) stab00 | AGAGUUUUCACUGCAUACGTT | 1109 |
| | (antisense) | | |
| 36444 | Luc3:486L21 siRNA (468C) stab00 | CUGAAAUCCCUGGUAAUCCTT | 1110 |
| | (antisense) | | |
| 36445 | HCVa:300L21 siRNA (282C) stab00 | GUACCACAAGGCCUUUCGCTT | 1111 |
| | (antisense) | | |
| 36446 | HCVa:325L21 siRNA (307C) stab00 | GCACUCGCAAGCACCCUATT | 1112 |
| | (antisense) | | |
| 36447 | HCVa:345L21 siRNA (327C) stab00 | GGUCUACGAGACCUCCCGGTT | 1113 |
| | (antisense) | | |

UPPER CASE = ribonucleotide
UPPER CASE UNDERLINE = 2′-O-methyl nucleotide
Lowercase = 2′-deoxy-2′-fluoro nucleotide
T C)= thymidine
T = Inverted thymidine
t = 3′-deoxy thymidine
B = inverted deoxyabasic succinate linker
B = inverted deoxyabasic
X = universal base (5-nitroindole)
Z = universal base (3-nitropyrrole)
S = phosphorothioate internucleotide linkage
U = 5-bromodeoxynridine
A = deoxyadenosine
G = deoxyguanosine
L = glyceryl moiety
ddC = dideoxy Cytidine
p = phosphate

[0940] TABLE II

| | | | | | |
|---|---|---|---|---|---|
| Reagent | Equivalents | Amount | Wait Time* DNA | Wait Time* 2′-O-methyl | Wait Time*RNA |

A. 2.5 μmol Synthesis Cycle ABI 394 Instrument

| | | | | | | | | | |
|---|---|---|---|---|---|---|---|---|---|
| Phosphoramidites | 6.5 | 163 | μL | 45 | sec | 2.5 | min | 7.5 | min |
| S-Ethyl Tetrazole | 23.8 | 238 | μL | 45 | sec | 2.5 | min | 7.5 | min |
| Acetic Anhydride | 100 | 233 | μL | 5 | sec | 5 | sec | 5 | sec |
| N-Methyl Imidazole | 186 | 233 | μL | 5 | sec | 5 | sec | 5 | sec |
| TCA | 176 | 2.3 | mL | 21 | sec | 21 | sec | 21 | sec |
| Iodine | 11.2 | 1.7 | mL | 45 | sec | 45 | sec | 45 | sec |
| Beaucage | 12.9 | 645 | μL | 100 | sec | 300 | sec | 300 | sec |

| | | | | | | |
|---|---|---|---|---|---|---|
| Acetonitrile | NA | 6.67 | mL | NA | NA | NA |

B. 0.2 μmol Synthesis Cycle ABI 394 Instrument

| | | | | | | | | | |
|---|---|---|---|---|---|---|---|---|---|
| Phosphoramidites | 15 | 31 | μL | 45 | sec | 233 | sec | 465 | sec |
| S-Ethyl Tetrazole | 38.7 | 31 | μL | 45 | sec | 233 | min | 465 | sec |
| Acetic Anhydride | 655 | 124 | μL | 5 | sec | 5 | sec | 5 | sec |
| N-Methyl Imidazole | 1245 | 124 | μL | 5 | sec | 5 | sec | 5 | sec |
| TCA | 700 | 732 | μL | 10 | sec | 10 | sec | 10 | sec |
| Iodine | 20.6 | 244 | μL | 15 | sec | 15 | sec | 15 | sec |
| Beaucage | 7.7 | 232 | μL | 100 | sec | 300 | sec | 300 | sec |

| | | | | | | |
|---|---|---|---|---|---|---|
| Acetonitrile | NA | 2.64 | mL | NA | NA | NA |

C. 0.2 μmol Synthesis Cycle 96 well Instrument

| | Equivalents: DNA/ | Amount: DNA/ | | | | Walt Time* | | | |
|---|---|---|---|---|---|---|---|---|---|
| Reagent | 2′-O-methyl/Ribo | 2′-O-methyl/Ribo | | Wait Time* DNA | | 2′-O-methyl | | Wait Time* Ribo | |
| Phosphoramidites | 22/33/66 | 40/60/120 | μL | 60 | sec | 180 | sec | 360 | sec |
| S-Ethyl Tetrazole | 70/105/210 | 40/60/120 | μL | 60 | sec | 180 | min | 360 | sec |
| Acetic Anhydride | 265/265/265 | 50/50/50 | μL | 10 | sec | 10 | sec | 10 | sec |
| N-Methyl Imidazole | 502/502/502 | 50/50/50 | μL | 10 | sec | 10 | sec | 10 | sec |
| TCA | 238/475/475 | 250/500/500 | μL | 15 | sec | 15 | sec | 15 | sec |
| Iodine | 6.8/6.8/6.8 | 80/80/80 | μL | 30 | sec | 30 | sec | 30 | sec |
| Beaucage | 34/51/51 | 80/120/120 | | 100 | sec | 200 | sec | 200 | sec |

| | | | | | | |
|---|---|---|---|---|---|---|
| Acetonitrile | NA | 1150/1150/1150 | μL | NA | NA | NA |

Wait time does not include contact time during delivery.
Tandem synthesis utilizes double coupling of linker molecule

[0941] TABLE III

| | Solution | | Number | | | | |
|---|---|---|---|---|---|---|---|
| | on Filter | Stock VEGF | of | Injectate | | Conc. | |
| Group | (1.0 μL) | concentration | Animals | (6.0 μL) | Dose | injectate | |
| 1 | Tris-Cl pH 6.9 | NA | 5 | water | NA | NA | |
| 2 | R&D Systems | 3.53 μg/μL | 5 | water | NA | NA | |
| | VEGF-carrier | | | | | | |
| | free 75 μM | | | | | | |
| 3 | R&D Systems | 3.53 μg/μL | 5 | Site 2340 | 10 μg/eye | 1.67 | μg/μL |
| | VEGF-carrier | | | Stab1 siRNA | | | |
| | free 75 μM | | | | | | |
| 4 | R&D Systems | 3.53 μg/μL | 5 | Site 2340 | 3 μg/eye | 0.5 | μg/μL |
| | VEGF-carrier | | | Stab1 siRNA | | | |
| | free 75 μM | | | | | | |
| 5 | R&D Systems | 3.53 μg/μL | 5 | Site 2340 | 1 μg/eye | 0.167 | μg/μL |
| | VEGF-carrier | | | Stab1 siRNA | | | |
| | free 75 μM | | | | | | |
| 6 | R&D Systems | 3.53 μg/μL | 5 | Inactive | 10 μg/eye | 1.67 | μg/μL |
| | VEGF-carrier | | | Site 2340 | | | |
| | free 75 μM | | | Stab1 siRNA | | | |
| 7 | R&D Systems | 3.53 μg/μL | 5 | Inactive | 3 μg/eye | 0.5 | μg/μL |
| | VEGF-carrier | | | Site 2340 | | | |
| | free 75 μM | | | Stab1 siRNA | | | |
| 8 | R&D Systems | 3.53 μg/μL | 5 | Inactive | 1 μg/eye | 0.167 | μg/μL |
| | VEGF-carrier | | | Site 2340 | | | |
| | free 75 μM | | | Stab1 siRNA | | | |

[0942] TABLE IV
Non-limiting examples of Stabilization Chemistries
for chemically modified siNA constructs

| Chemistry | pyrimidine | Purine | Cap | p = S | Strand |
|---|---|---|---|---|---|
| “Stab 00” | Ribo | Ribo | TT at | | S/AS |
| | | | 3′-ends | | |
| “Stab 1” | Ribo | Ribo | — | 5 at 5′-end | S/AS |
| | | | | 1 at 3′-end | |
| “Stab 2” | Ribo | Ribo | — | All | Usually AS |
| | | | | linkages | |
| “Stab 3” | 2′-fluoro | Ribo | — | 4 at 5′-end | Usually S |
| | | | | 4 at 3′-end | |
| “Stab 4” | 2′-fluoro | Ribo | 5′ and | — | Usually S |
| | | | 3′-ends | | |
| “Stab 5” | 2′-fluoro | Ribo | — | 1 at 3′-end | Usually AS |
| “Stab 6” | 2′-O-Methyl | Ribo | 5′ and | — | Usually S |
| | | | 3′-ends | | |
| “Stab 7” | 2′-fluoro | 2′-deoxy | 5′ and | — | Usually S |
| | | | 3′-ends | | |
| “Stab 8” | 2′-fluoro | 2′-O-Methyl | — | 1 at 3′-end | Usually AS |
| “Stab 9” | Ribo | Ribo | 5′ and | — | Usually S |
| | | | 3′-ends | | |
| “Stab 10” | Ribo | Ribo | — | 1 at 3′-end | Usually AS |
| “Stab 11” | 2′-fluoro | 2′-deoxy | — | 1 at 3′-end | Usually AS |
| “Stab 12” | 2′-fluoro | LNA | 5′ and | | Usually S |
| | | | 3′-ends | | |
| “Stab 13” | 2′-fluoro | LNA | | 1 at 3′-end | Usually AS |
| “Stab 14” | 2′-fluoro | 2′-deoxy | | 2 at 5′-end | Usually AS |
| | | | | 1 at 3′-end | |
| “Stab 15” | 2′-deoxy | 2′-deoxy | | 2 at 5′-end | Usually AS |
| | | | | 1 at 3′-end | |
| “Stab 16 | Ribo | 2′-O-Methyl | 5′ and | | Usually S |
| | | | 3′-ends | | |
| “Stab 17” | 2′-O-Methyl | 2′-O-Methyl | 5′ and | | Usually S |
| | | | 3′-ends | | |
| “Stab 18” | 2′-fluoro | 2′-O-Methyl | 5′ and | 1 at 3′-end | Usually S |
| | | | 3′-ends | | |
| “Stab 19” | 2′-fluoro | 2′-O-Methyl | 3′-end | | Usually AS |
| “Stab 20” | 2′-fluoro | 2′-deoxy | 3′-end | | Usually AS |
| “Stab 21” | 2′-fluoro | Ribo | 3′-end | | Usually AS |
| “Stab 22” | Ribo | Ribo | 3′-end - | | Usually AS |
| “Stab 23” | 2′-fluoro* | 2′-deoxy* | 5′ and | | Usually S |
| | | | 3′-ends | | |
| “Stab 24” | 2′-fluoro* | 2′-O-Methyl* | — | 1 at 3′-end | Usually AS |
| “Stab 25” | 2′-fluoro* | 2′-O-Methyl* | — | 1 at 3′-end | Usually AS |

CAP = any terminal cap, see for example FIG. 10.
All Stab 1-25 chemistries can comprise 3′-terminal thymidine (TT) residues
All Stab 1-25 chemistries typically comprise about 21 nucleotides, but can vary as described herein.
S = sense strand
AS = antisense strand
*Stab 23 has single ribonucleotide adjacent to 3′-CAP
*Stab 24 has single ribonucleotide at 5′-terminus
*Stab 25 has three ribonucleotides at 5-terminus

[0943] TABLE V

Peptides for Conjugation

SEQ
ID

| | | |
|---|---|---|
| Peptide | Sequence | NO |

| | | |
|---|---|---|
| ANTENNAPEDIA | RQI KIW FQN RRM KWK K amide | 1114 |
| Kaposi | AAV ALL PAV LLA LLA P + VQR KRQ | 1115 |
| fibroblast | KLMP | |
| growth factor | | |
| caiman | MGL GLH LLV LAA ALQ GA | 1116 |
| crocodylus | | |
| Ig(5) light | | |
| chain | | |
| HIV envelope | GAL FLG FLG AAG STM GA + PKS | 1117 |
| glycoprotein | KRK 5 (NLS of the SV40) | |
| gp41 | | |
| HIV-1 Tat | RKK RRQ RRR | 1118 |
| Influenza | GLFEAIAGFIENGWEGMIDGGGYC | 1119 |
| hemagglutinin | | |
| envelop | | |
| glycoprotein | | |
| RGD peptide | X-RGD-X | 1120 |
| | where X is any amino acid or | |
| | peptide | |
| transportan A | GWT LNS AGY LLG KIN LKA LAA | 1121 |
| | LAK KIL | |
| Somatostatin | (S)FC YWK TCT | 1122 |
| (tyr-3- | | |
| octreotate) | | |
| Pre-S-peptide | (S)DH QLN PAF | 1123 |

(S) optional Serine for coupling
Italic = optional D isomer for stability

[0944] TABLE VI
Duplex half-lives in human and mouse serum and liver extracts

| | Stability S/AS Sirna # | | | | | |
|---|---|---|---|---|---|---|
| | All RNA | 4*/5 | 4/5* | 7/11* | 7*/8 | 7/8* |
| | 47715/47933 | 30355/30366 | 30355/30366 | 30612/31175 | 30612/30620 | 30612/30620 |
| Human | 0.017 | 408 | 39 | 54 | 130 | 94 |
| Serum | | (0.96)^{†} | (0.65) | (0.76) | (0.88) | (0.86) |
| t_{1/2} hours | | | | | | |
| Human | 2.5 | 28.6 | 43.5 | 0.78/2.9^{‡} | 9 | 816 |
| Liver | | (0.40) | (0.66) | (0.45) | (0.39) | (0.99) |
| t_{1/2} hours | | | | | | |
| Mouse | 1.17 | 16.7 | 10 | 2.3 | 16.6 | 35.7 |
| Serum | | (0.9) | (0.81) | | (0.46) | (0.69) |
| t_{1/2} hours | | | | | | |
| Mouse | 6 | 1.08 | 0.80 | 0.20 | 0.22 | 120 |
| Liver | | | | | | (0.89) |
| t_{1/2} hours | | | | | | |

*The asterisk designates the strand carrying the radiolabel in the duplex.
^{†}For longer half-lives the fraction full-length at the 18 hours is presented as the parenthetic lower number in each cell.
^{‡}A biphasic curve was observed, half-lives for both phases are shown.

[0945] TABLE VII
Single strand half-lives in human serum

| | Stability Sirna # | | | | |
|---|---|---|---|---|---|
| | 4 | 5 | 7 | 11 | 8 |
| | 30355 | 30366 | 30612 | 31175 | 30620 |
| Human serum | 22 | 16 | 13 | 19 | 28 |
| t_{1/2} hours | | | | | |
| Human liver | 0.92 | 0.40 | 0.43 | 0.27 | 192 |
| t_{1/2} hours | | | | | |

[0946] TABLE VIII
Human serum half-lives for Stab 4/5 duplex chemistry
with terminus chemistries of FIG. 22

| | Cap Chemistry | | | | | | | |
|---|---|---|---|---|---|---|---|---|
| | 2 | 7 | 9 | 2 | 8 | 1 | 3 | 6 |
| | (R = O) | (R = O) | (R = O) | (R = S) | (R = O) | (R = O) | (R = O) | (R = O) |
| | (B = T) | (B = T) | (B = T) | (B = T) | (B = T) | (B = T) | (B = T) | (B = T) |
| Human | 1 | 1.2 | 2.3 | 39 | 96 | 460 | 770 | 770 |
| Serum | | | | | (0.69)^{‡} | (0.95) | (0.94) | (0.95) |
| t_{1/2} | | | | | | | | |
| hours | | | | | | | | |

The capping structures were in the following position of the 4:5 chemistry formatted sequence:
antisense strand - 5′-uuGuuGuAuuuuGuGGuuG- CAP - 3′ where CAP is 1, 2, 3, 6, 7, 8, or 9 from FIG. 22. (SEQ ID NO: 670)
sense strand 5′-CAP- cAAccAcAAAAuAcAAcAATT- CAP - 3′ where CAP is 1 from FIG. 22. (SEQ ID NO: 671)
^{‡}For half-lives that extend beyond the time course sampled the fraction full-length is presented in parentheses.

The application's sequence listing, which the Patent Office published only in electronic form, follows.

SEQUENCE LISTING (1153 sequences)

SEQ ID NO: 1 - RNA, 21 nt, Artificial Sequence
  Description of Artificial Sequence:  Synthetic
  misc_feature (1)..(1): 5'-3 attached terminal deoxyabasic moiety
  misc_feature (21)..(21): 3'-3 attached terminal deoxyabasic moiety
uaaccucguacuggugccucc

SEQ ID NO: 2 - RNA, 21 nt, Artificial Sequence
  Description of Artificial Sequence:  Synthetic
  misc_feature (1)..(1): 5'-3 attached terminal deoxyabasic moiety
  misc_feature (21)..(21): 3'-3 attached terminal deoxyabasic moiety
ggaggcaccaguacgagguua

SEQ ID NO: 3 - RNA, 21 nt, Artificial Sequence
  Description of Artificial Sequence:  Synthetic
  misc_feature (1)..(1): 5'-3 attached terminal deoxyabasic moiety
  misc_feature (21)..(21): 3'-3 attached terminal deoxyabasic moiety
aaacuccaagauccccaauca

SEQ ID NO: 4 - RNA, 21 nt, Artificial Sequence
  Description of Artificial Sequence:  Synthetic
  misc_feature (1)..(1): 5'-3 attached terminal deoxyabasic moiety
  misc_feature (21)..(21): 3'-3 attached terminal deoxyabasic moiety
ugauuggggaucuuggaguuu

SEQ ID NO: 5 - RNA, 21 nt, Artificial Sequence
  Description of Artificial Sequence:  Synthetic
  misc_feature (1)..(1): 5'-3 attached terminal deoxyabasic moiety
  misc_feature (21)..(21): 3'-3 attached terminal deoxyabasic moiety
guuggagucuguaggacuugg

SEQ ID NO: 6 - RNA, 21 nt, Artificial Sequence
  Description of Artificial Sequence:  Synthetic
  misc_feature (1)..(1): 5'-3 attached terminal deoxyabasic moiety
  misc_feature (21)..(21): 3'-3 attached terminal deoxyabasic moiety
ccaaguccuacagacuccaac

SEQ ID NO: 7 - RNA, 21 nt, Artificial Sequence
  Description of Artificial Sequence:  Synthetic
  misc_feature (1)..(1): 5'-3 attached terminal deoxyabasic moiety
  misc_feature (21)..(21): 3'-3 attached terminal deoxyabasic moiety
gcaaaaacccugugauuuccu

SEQ ID NO: 8 - RNA, 21 nt, Artificial Sequence
  Description of Artificial Sequence:  Synthetic
  misc_feature (1)..(1): 5'-3 attached terminal deoxyabasic moiety
  misc_feature (21)..(21): 3'-3 attached terminal deoxyabasic moiety
aggaaaucacaggguuuuugc

SEQ ID NO: 9 - RNA, 21 nt, Artificial Sequence
  Description of Artificial Sequence:  Synthetic
  misc_feature (1)..(1): 5'-3 attached terminal deoxyabasic moiety
  misc_feature (21)..(21): 3'-3 attached terminal deoxyabasic moiety
uuggucaguuucuggcaguuc

SEQ ID NO: 10 - RNA, 21 nt, Artificial Sequence
  Description of Artificial Sequence:  Synthetic
  misc_feature (1)..(1): 5'-3 attached terminal deoxyabasic moiety
  misc_feature (21)..(21): 3'-3 attached terminal deoxyabasic moiety
gaacugccagaaacugaccaa

SEQ ID NO: 11 - RNA, 21 nt, Artificial Sequence
  Description of Artificial Sequence:  Synthetic
  misc_feature (1)..(1): 5'-3 attached terminal deoxyabasic moiety
  misc_feature (21)..(21): 3'-3 attached terminal deoxyabasic moiety
gguccuuucuuggaucaaccc

SEQ ID NO: 12 - RNA, 21 nt, Artificial Sequence
  Description of Artificial Sequence:  Synthetic
  misc_feature (1)..(1): 5'-3 attached terminal deoxyabasic moiety
  misc_feature (21)..(21): 3'-3 attached terminal deoxyabasic moiety
ggguugauccaagaaaggacc

SEQ ID NO: 13 - RNA, 21 nt, Artificial Sequence
  Description of Artificial Sequence:  Synthetic
  misc_feature (1)..(1): 5'-3 attached terminal deoxyabasic moiety
  misc_feature (21)..(21): 3'-3 attached terminal deoxyabasic moiety
uggacuucucucaauuuucua

SEQ ID NO: 14 - RNA, 21 nt, Artificial Sequence
  Description of Artificial Sequence:  Synthetic
  misc_feature (1)..(1): 5'-3 attached terminal deoxyabasic moiety
  misc_feature (21)..(21): 3'-3 attached terminal deoxyabasic moiety
uagaaaauugagagaagucca

SEQ ID NO: 15 - RNA, 21 nt, Artificial Sequence
  Description of Artificial Sequence:  Synthetic
  misc_feature (1)..(1): 5'-3 attached terminal deoxyabasic moiety
  misc_feature (21)..(21): 3'-3 attached terminal deoxyabasic moiety
uuuuucaccucugccuaauca

SEQ ID NO: 16 - RNA, 21 nt, Artificial Sequence
  Description of Artificial Sequence:  Synthetic
  misc_feature (1)..(1): 5'-3 attached terminal deoxyabasic moiety
  misc_feature (21)..(21): 3'-3 attached terminal deoxyabasic moiety
ugauuaggcagaggugaaaaa

SEQ ID NO: 17 - RNA, 21 nt, Artificial Sequence
  Description of Artificial Sequence:  Synthetic
  misc_feature (1)..(1): 5'-3 attached terminal deoxyabasic moiety
  misc_feature (21)..(21): 3'-3 attached terminal deoxyabasic moiety
caagccuccaagcugugccuu

SEQ ID NO: 18 - RNA, 21 nt, Artificial Sequence
  Description of Artificial Sequence:  Synthetic
  misc_feature (1)..(1): 5'-3 attached terminal deoxyabasic moiety
  misc_feature (21)..(21): 3'-3 attached terminal deoxyabasic moiety
aaggcacagcuuggaggcuug

SEQ ID NO: 19 - RNA, 21 nt, Artificial Sequence
  Description of Artificial Sequence:  Synthetic
  misc_feature (1)..(1): 5'-3 attached terminal deoxyabasic moiety
  misc_feature (21)..(21): 3'-3 attached terminal deoxyabasic moiety
uccauggugcucacugcggcu

SEQ ID NO: 20 - RNA, 21 nt, Artificial Sequence
  Description of Artificial Sequence:  Synthetic
  misc_feature (1)..(1): 5'-3 attached terminal deoxyabasic moiety
  misc_feature (21)..(21): 3'-3 attached terminal deoxyabasic moiety
agccgcagugagcaccaugga

SEQ ID NO: 21 - RNA, 21 nt, Artificial Sequence
  Description of Artificial Sequence:  Synthetic
  misc_feature (1)..(1): 5'-3 attached terminal deoxyabasic moiety
  misc_feature (21)..(21): 3'-3 attached terminal deoxyabasic moiety
agguaccacgagugacgccga

SEQ ID NO: 22 - RNA, 21 nt, Artificial Sequence
  Description of Artificial Sequence:  Synthetic
  misc_feature (1)..(1): 5'-3 attached terminal deoxyabasic moiety
  misc_feature (21)..(21): 3'-3 attached terminal deoxyabasic moiety
ucggcgucacucgugguaccu

SEQ ID NO: 23 - RNA, 21 nt, Artificial Sequence
  Description of Artificial Sequence:  Synthetic
  misc_feature (1)..(1): 5'-3 attached terminal deoxyabasic moiety
  misc_feature (21)..(21): 3'-3 attached terminal deoxyabasic moiety
ccuccguggucaugcuccaau

SEQ ID NO: 24 - RNA, 21 nt, Artificial Sequence
  Description of Artificial Sequence:  Synthetic
  misc_feature (1)..(1): 5'-3 attached terminal deoxyabasic moiety
  misc_feature (21)..(21): 3'-3 attached terminal deoxyabasic moiety
auuggagcaugaccacggagg

SEQ ID NO: 25 - RNA, 21 nt, Artificial Sequence
  Description of Artificial Sequence:  Synthetic
  misc_feature (1)..(1): 5'-3 attached terminal deoxyabasic moiety
  misc_feature (21)..(21): 3'-3 attached terminal deoxyabasic moiety
cccaacuagguucuuuccugg

SEQ ID NO: 26 - RNA, 21 nt, Artificial Sequence
  Description of Artificial Sequence:  Synthetic
  misc_feature (1)..(1): 5'-3 attached terminal deoxyabasic moiety
  misc_feature (21)..(21): 3'-3 attached terminal deoxyabasic moiety
ccaggaaagaaccuaguuggg

SEQ ID NO: 27 - RNA, 23 nt, Artificial Sequence
  Description of Artificial Sequence:  Synthetic
uaaccucguacuggugccuccuu

SEQ ID NO: 28 - RNA, 23 nt, Artificial Sequence
  Description of Artificial Sequence:  Synthetic
ggaggcaccaguacgagguuauu

SEQ ID NO: 29 - RNA, 23 nt, Artificial Sequence
  Description of Artificial Sequence:  Synthetic
aaacuccaagauccccaaucauu

SEQ ID NO: 30 - RNA, 23 nt, Artificial Sequence
  Description of Artificial Sequence:  Synthetic
  misc_feature (1)..(1): 5'-3 attached terminal deoxyabasic moiety
  misc_feature (21)..(21): 3'-3 attached terminal deoxyabasic moiety
uaaccucguacuggugccuccuu

SEQ ID NO: 31 - RNA, 23 nt, Artificial Sequence
  Description of Artificial Sequence:  Synthetic
  misc_feature (1)..(1): 5'-3 attached terminal deoxyabasic moiety
  misc_feature (21)..(21): 3'-3 attached terminal deoxyabasic moiety
ggaggcaccaguacgagguuauu

SEQ ID NO: 32 - RNA, 23 nt, Artificial Sequence
  Description of Artificial Sequence:  Synthetic
  misc_feature (1)..(1): 5'-3 attached terminal deoxyabasic moiety
  misc_feature (21)..(21): 3'-3 attached terminal deoxyabasic moiety
aaacuccaagauccccaaucauu

SEQ ID NO: 33 - RNA, 23 nt, Artificial Sequence
  Description of Artificial Sequence:  Synthetic
ugauuggggaucuuggaguuuuu

SEQ ID NO: 34 - RNA, 23 nt, Artificial Sequence
  Description of Artificial Sequence:  Synthetic
guuggagucuguaggacuugguu

SEQ ID NO: 35 - RNA, 23 nt, Artificial Sequence
  Description of Artificial Sequence:  Synthetic
ccaaguccuacagacuccaacuu

SEQ ID NO: 36 - RNA, 23 nt, Artificial Sequence
  Description of Artificial Sequence:  Synthetic
  misc_feature (1)..(1): 5'-3 attached terminal deoxyabasic moiety
  misc_feature (21)..(21): 3'-3 attached terminal deoxyabasic moiety
ugauuggggaucuuggaguuuuu

SEQ ID NO: 37 - RNA, 23 nt, Artificial Sequence
  Description of Artificial Sequence:  Synthetic
  misc_feature (1)..(1): 5'-3 attached terminal deoxyabasic moiety
  misc_feature (21)..(21): 3'-3 attached terminal deoxyabasic moiety
guuggagucuguaggacuugguu

SEQ ID NO: 38 - RNA, 23 nt, Artificial Sequence
  Description of Artificial Sequence:  Synthetic
  misc_feature (1)..(1): 5'-3 attached terminal deoxyabasic moiety
  misc_feature (21)..(21): 3'-3 attached terminal deoxyabasic moiety
ccaaguccuacagacuccaacuu

SEQ ID NO: 39 - RNA, 23 nt, Artificial Sequence
  Description of Artificial Sequence:  Synthetic
gcaaaaacccugugauuuccuuu

SEQ ID NO: 40 - RNA, 23 nt, Artificial Sequence
  Description of Artificial Sequence:  Synthetic
aggaaaucacaggguuuuugcuu

SEQ ID NO: 41 - RNA, 23 nt, Artificial Sequence
  Description of Artificial Sequence:  Synthetic
uuggucaguuucuggcaguucuu

SEQ ID NO: 42 - RNA, 23 nt, Artificial Sequence
  Description of Artificial Sequence:  Synthetic
  misc_feature (1)..(1): 5'-3 attached terminal deoxyabasic moiety
  misc_feature (21)..(21): 3'-3 attached terminal deoxyabasic moiety
gcaaaaacccugugauuuccuuu

SEQ ID NO: 43 - RNA, 23 nt, Artificial Sequence
  Description of Artificial Sequence:  Synthetic
  misc_feature (1)..(1): 5'-3 attached terminal deoxyabasic moiety
  misc_feature (21)..(21): 3'-3 attached terminal deoxyabasic moiety
aggaaaucacaggguuuuugcuu

SEQ ID NO: 44 - RNA, 23 nt, Artificial Sequence
  Description of Artificial Sequence:  Synthetic
  misc_feature (1)..(1): 5'-3 attached terminal deoxyabasic moiety
  misc_feature (21)..(21): 3'-3 attached terminal deoxyabasic moiety
uuggucaguuucuggcaguucuu

SEQ ID NO: 45 - RNA, 23 nt, Artificial Sequence
  Description of Artificial Sequence:  Synthetic
gaacugccagaaacugaccaauu

SEQ ID NO: 46 - RNA, 23 nt, Artificial Sequence
  Description of Artificial Sequence:  Synthetic
gguccuuucuuggaucaacccuu

SEQ ID NO: 47 - RNA, 23 nt, Artificial Sequence
  Description of Artificial Sequence:  Synthetic
ggguugauccaagaaaggaccuu

SEQ ID NO: 48 - RNA, 23 nt, Artificial Sequence
  Description of Artificial Sequence:  Synthetic
  misc_feature (1)..(1): 5'-3 attached terminal deoxyabasic moiety
  misc_feature (21)..(21): 3'-3 attached terminal deoxyabasic moiety
gaacugccagaaacugaccaauu

SEQ ID NO: 49 - RNA, 23 nt, Artificial Sequence
  Description of Artificial Sequence:  Synthetic
  misc_feature (1)..(1): 5'-3 attached terminal deoxyabasic moiety
  misc_feature (21)..(21): 3'-3 attached terminal deoxyabasic moiety
gguccuuucuuggaucaacccuu

SEQ ID NO: 50 - RNA, 23 nt, Artificial Sequence
  Description of Artificial Sequence:  Synthetic
  misc_feature (1)..(1): 5'-3 attached terminal deoxyabasic moiety
  misc_feature (21)..(21): 3'-3 attached terminal deoxyabasic moiety
ggguugauccaagaaaggaccuu

SEQ ID NO: 51 - RNA, 23 nt, Artificial Sequence
  Description of Artificial Sequence:  Synthetic
uggacuucucucaauuuucuauu

SEQ ID NO: 52 - RNA, 23 nt, Artificial Sequence
  Description of Artificial Sequence:  Synthetic
uagaaaauugagagaaguccauu

SEQ ID NO: 53 - RNA, 23 nt, Artificial Sequence
  Description of Artificial Sequence:  Synthetic
uuuuucaccucugccuaaucauu

SEQ ID NO: 54 - RNA, 23 nt, Artificial Sequence
  Description of Artificial Sequence:  Synthetic
  misc_feature (1)..(1): 5'-3 attached terminal deoxyabasic moiety
  misc_feature (21)..(21): 3'-3 attached terminal deoxyabasic moiety
uggacuucucucaauuuucuauu

SEQ ID NO: 55 - RNA, 23 nt, Artificial Sequence
  Description of Artificial Sequence:  Synthetic
  misc_feature (1)..(1): 5'-3 attached terminal deoxyabasic moiety
  misc_feature (21)..(21): 3'-3 attached terminal deoxyabasic moiety
uagaaaauugagagaaguccauu

SEQ ID NO: 56 - RNA, 23 nt, Artificial Sequence
  Description of Artificial Sequence:  Synthetic
  misc_feature (1)..(1): 5'-3 attached terminal deoxyabasic moiety
  misc_feature (21)..(21): 3'-3 attached terminal deoxyabasic moiety
uuuuucaccucugccuaaucauu

SEQ ID NO: 57 - RNA, 23 nt, Artificial Sequence
  Description of Artificial Sequence:  Synthetic
ugauuaggcagaggugaaaaauu

SEQ ID NO: 58 - RNA, 23 nt, Artificial Sequence
  Description of Artificial Sequence:  Synthetic
caagccuccaagcugugccuuuu

SEQ ID NO: 59 - RNA, 23 nt, Artificial Sequence
  Description of Artificial Sequence:  Synthetic
aaggcacagcuuggaggcuuguu

SEQ ID NO: 60 - RNA, 23 nt, Artificial Sequence
  Description of Artificial Sequence:  Synthetic
  misc_feature (1)..(1): 5'-3 attached terminal deoxyabasic moiety
  misc_feature (21)..(21): 3'-3 attached terminal deoxyabasic moiety
ugauuaggcagaggugaaaaauu

SEQ ID NO: 61 - RNA, 23 nt, Artificial Sequence
  Description of Artificial Sequence:  Synthetic
  misc_feature (1)..(1): 5'-3 attached terminal deoxyabasic moiety
  misc_feature (21)..(21): 3'-3 attached terminal deoxyabasic moiety
caagccuccaagcugugccuuuu

SEQ ID NO: 62 - RNA, 23 nt, Artificial Sequence
  Description of Artificial Sequence:  Synthetic
  misc_feature (1)..(1): 5'-3 attached terminal deoxyabasic moiety
  misc_feature (21)..(21): 3'-3 attached terminal deoxyabasic moiety
aaggcacagcuuggaggcuuguu

SEQ ID NO: 63 - RNA, 23 nt, Artificial Sequence
  Description of Artificial Sequence:  Synthetic
uccauggugcucacugcggcuuu

SEQ ID NO: 64 - RNA, 23 nt, Artificial Sequence
  Description of Artificial Sequence:  Synthetic
agccgcagugagcaccauggauu

SEQ ID NO: 65 - RNA, 23 nt, Artificial Sequence
  Description of Artificial Sequence:  Synthetic
  misc_feature (1)..(1): 5'-3 attached terminal deoxyabasic moiety
  misc_feature (21)..(21): 3'-3 attached terminal deoxyabasic moiety
uccauggugcucacugcggcuuu

SEQ ID NO: 66 - RNA, 23 nt, Artificial Sequence
  Description of Artificial Sequence:  Synthetic
  misc_feature (1)..(1): 5'-3 attached terminal deoxyabasic moiety
  misc_feature (21)..(21): 3'-3 attached terminal deoxyabasic moiety
agccgcagugagcaccauggauu

SEQ ID NO: 67 - DNA, 21 bp, Artificial Sequence
  Description of Artificial Sequence:  Synthetic
  misc_feature (1)..(19): ribonucleotide modified as described
cguacgcggaauacuucgatt

SEQ ID NO: 68 - DNA, 21 bp, Artificial Sequence
  Description of Artificial Sequence:  Synthetic
  misc_feature (1)..(19): ribonucleotide modified as described
ucgaaguauuccgcguacgtt

SEQ ID NO: 69 - DNA, 21 bp, Artificial Sequence
  Description of Artificial Sequence:  Synthetic
  misc_feature (1)..(19): ribonucleotide modified as described
agcuucauaaggcgcaugctt

SEQ ID NO: 70 - DNA, 21 bp, Artificial Sequence
  Description of Artificial Sequence:  Synthetic
  misc_feature (1)..(19): ribonucleotide modified as described
gcaugcgccuuaugaagcutt

SEQ ID NO: 71 - DNA, 21 bp, Artificial Sequence
  Description of Artificial Sequence:  Synthetic
  misc_feature (1)..(18): Phosphorothioate 3'-Internucleotide Linkage
  misc_feature (1)..(19): ribonucleotide modified as described
cguacgcggaauacuucgatt

SEQ ID NO: 72 - DNA, 21 bp, Artificial Sequence
  Description of Artificial Sequence:  Synthetic
  misc_feature (1)..(1): Phosphorothioate 3'-Internucleotide Linkage
  misc_feature (3)..(3): Phosphorothioate 3'-Internucleotide Linkage
  misc_feature (5)..(5): Phosphorothioate 3'-Internucleotide Linkage
  misc_feature (7)..(7): Phosphorothioate 3'-Internucleotide Linkage
  misc_feature (12)..(12): Phosphorothioate 3'-Internucleotide Linkage
  misc_feature (14)..(17): Phosphorothioate 3'-Internucleotide Linkage
  misc_feature (1)..(19): ribonucleotide modified as described
cguacgcggaauacuucgatt

SEQ ID NO: 73 - DNA, 21 bp, Artificial Sequence
  Description of Artificial Sequence:  Synthetic
  misc_feature (1)..(14): Phosphorothioate 3'-Internucleotide Linkage
  misc_feature (1)..(19): ribonucleotide modified as described
cguacgcggaauacuucgatt

SEQ ID NO: 74 - DNA, 21 bp, Artificial Sequence
  Description of Artificial Sequence:  Synthetic
  misc_feature (1)..(10): Phosphorothioate 3'-Internucleotide Linkage
  misc_feature (1)..(19): ribonucleotide modified as described
cguacgcggaauacuucgatt

SEQ ID NO: 75 - DNA, 21 bp, Artificial Sequence
  Description of Artificial Sequence:  Synthetic
  misc_feature (1)..(5): Phosphorothioate 3'-Internucleotide Linkage
  misc_feature (1)..(19): ribonucleotide modified as described
cguacgcggaauacuucgatt

SEQ ID NO: 76 - DNA, 21 bp, Artificial Sequence
  Description of Artificial Sequence:  Synthetic
  misc_feature (1)..(18): Phosphorothioate 3'-Internucleotide Linkage
  misc_feature (1)..(19): ribonucleotide modified as described
ucgaaguauuccgcguacgtt

SEQ ID NO: 77 - DNA, 21 bp, Artificial Sequence
  Description of Artificial Sequence:  Synthetic
  misc_feature (1)..(2): Phosphorothioate 3'-Internucleotide Linkage
  misc_feature (7)..(7): Phosphorothioate 3'-Internucleotide Linkage
  misc_feature (9)..(12): Phosphorothioate 3'-Internucleotide Linkage
  misc_feature (14)..(14): Phosphorothioate 3'-Internucleotide Linkage
  misc_feature (16)..(16): Phosphorothioate 3'-Internucleotide Linkage
  misc_feature (18)..(18): Phosphorothioate 3'-Internucleotide Linkage
  misc_feature (1)..(19): ribonucleotide modified as described
ucgaaguauuccgcguacgtt

SEQ ID NO: 78 - DNA, 21 bp, Artificial Sequence
  Description of Artificial Sequence:  Synthetic
  misc_feature (1)..(5): Phosphorothioate 3'-Internucleotide Linkage
  misc_feature (7)..(14): Phosphorothioate 3'-Internucleotide Linkage
  misc_feature (1)..(19): ribonucleotide modified as described
ucgaaguauuccgcguacgtt

SEQ ID NO: 79 - DNA, 21 bp, Artificial Sequence
  Description of Artificial Sequence:  Synthetic
  misc_feature (1)..(10): Phosphorothioate 3'-Internucleotide Linkage
  misc_feature (1)..(19): ribonucleotide modified as described
ucgaaguauuccgcguacgtt

SEQ ID NO: 80 - DNA, 21 bp, Artificial Sequence
  Description of Artificial Sequence:  Synthetic
  misc_feature (1)..(5): Phosphorothioate 3'-Internucleotide Linkage
  misc_feature (1)..(19): ribonucleotide modified as described
ucgaaguauuccgcguacgtt

SEQ ID NO: 81 - DNA, 6 bp, Artificial Sequence
  Description of Artificial Sequence:  Synthetic
cguacg

SEQ ID NO: 82 - DNA, 15 bp, Artificial Sequence
  Description of Artificial Sequence:  Synthetic
  misc_feature (1)..(13): ribonucleotide modified as described
cggaauacuucgatt

SEQ ID NO: 83 - DNA, 8 bp, Artificial Sequence
  Description of Artificial Sequence:  Synthetic
ucgaagua

SEQ ID NO: 84 - DNA, 13 bp, Artificial Sequence
  Description of Artificial Sequence:  Synthetic
  misc_feature (1)..(11): ribonucleotide modified as described
uuccgcguacgtt

SEQ ID NO: 85 - DNA, 21 bp, Artificial Sequence
  Description of Artificial Sequence:  Synthetic
  misc_feature (1)..(1): Phosphorothioate 3'-Internucleotide Linkage
  misc_feature (3)..(3): Phosphorothioate 3'-Internucleotide Linkage
  misc_feature (5)..(5): Phosphorothioate 3'-Internucleotide Linkage
  misc_feature (7)..(7): Phosphorothioate 3'-Internucleotide Linkage
  misc_feature (12)..(12): Phosphorothioate 3'-Internucleotide Linkage
  misc_feature (14)..(17): Phosphorothioate 3'-Internucleotide Linkage
  misc_feature (1)..(19): ribonucleotide modified as described
  misc_feature (20)..(20): Phosphorothioate 3'-Internucleotide Linkage
cguacgcggaauacuucgatt

SEQ ID NO: 86 - DNA, 21 bp, Artificial Sequence
  Description of Artificial Sequence:  Synthetic
  misc_feature (1)..(19): ribonucleotide modified as described
  misc_feature (20)..(20): Phosphorothioate 3'-Internucleotide Linkage
ucgaaguauuccgcguacgtt

SEQ ID NO: 87 - DNA, 21 bp, Artificial Sequence
  Description of Artificial Sequence:  Synthetic
  misc_feature (1)..(2): Phosphorothioate 3'-Internucleotide Linkage
  misc_feature (7)..(7): Phosphorothioate 3'-Internucleotide Linkage
  misc_feature (9)..(12): Phosphorothioate 3'-Internucleotide Linkage
  misc_feature (14)..(14): Phosphorothioate 3'-Internucleotide Linkage
  misc_feature (16)..(16): Phosphorothioate 3'-Internucleotide Linkage
  misc_feature (18)..(18): Phosphorothioate 3'-Internucleotide Linkage
  misc_feature (1)..(19): ribonucleotide modified as described
  misc_feature (20)..(20): Phosphorothioate 3'-Internucleotide Linkage
ucgaaguauuccgcguacgtt

SEQ ID NO: 88 - DNA, 21 bp, Artificial Sequence
  Description of Artificial Sequence:  Synthetic
  misc_feature (1)..(19): ribonucleotide modified as described
uggggucgucaaagacguutt

SEQ ID NO: 89 - DNA, 21 bp, Artificial Sequence
  Description of Artificial Sequence:  Synthetic
  misc_feature (1)..(19): ribonucleotide modified as described
aacgucuuugacgaccccatt

SEQ ID NO: 90 - DNA, 21 bp, Artificial Sequence
  Description of Artificial Sequence:  Synthetic
  misc_feature (1)..(19): ribonucleotide modified as described
uugcagaaacugcuggggutt

SEQ ID NO: 91 - DNA, 21 bp, Artificial Sequence
  Description of Artificial Sequence:  Synthetic
  misc_feature (1)..(19): ribonucleotide modified as described
accccagcaguuucugcaatt

SEQ ID NO: 92 - DNA, 21 bp, Artificial Sequence
  Description of Artificial Sequence:  Synthetic
  misc_feature (1)..(19): ribonucleotide modified as described
ggugcuuggaucuggcgcutt

SEQ ID NO: 93 - DNA, 21 bp, Artificial Sequence
  Description of Artificial Sequence:  Synthetic
  misc_feature (1)..(19): ribonucleotide modified as described
agcgccagauccaagcacctt

SEQ ID NO: 94 - DNA, 21 bp, Artificial Sequence
  Description of Artificial Sequence:  Synthetic
  misc_feature (1)..(19): ribonucleotide modified as described
ucgcggucuagguucguggtt

SEQ ID NO: 95 - DNA, 21 bp, Artificial Sequence
  Description of Artificial Sequence:  Synthetic
  misc_feature (1)..(19): ribonucleotide modified as described
ccacgaaccuagaccgcgatt

SEQ ID NO: 96 - DNA, 21 bp, Artificial Sequence
  Description of Artificial Sequence:  Synthetic
  misc_feature (1)..(19): ribonucleotide modified as described
gaucuuugggagccuggcatt

SEQ ID NO: 97 - DNA, 21 bp, Artificial Sequence
  Description of Artificial Sequence:  Synthetic
  misc_feature (1)..(19): ribonucleotide modified as described
ugccaggcucccaaagauctt

SEQ ID NO: 98 - DNA, 21 bp, Artificial Sequence
  Description of Artificial Sequence:  Synthetic
  misc_feature (1)..(19): ribonucleotide modified as described
acgguccgaggguuucuagtt

SEQ ID NO: 99 - DNA, 21 bp, Artificial Sequence
  Description of Artificial Sequence:  Synthetic
  misc_feature (1)..(19): ribonucleotide modified as described
cuagaaacccucggaccgutt

SEQ ID NO: 100 - DNA, 21 bp, Artificial Sequence
  Description of Artificial Sequence:  Synthetic
  misc_feature (3)..(6): Phosphorothioate 3'-Internucleotide Linkage
  misc_feature (8)..(8): Phosphorothioate 3'-Internucleotide Linkage
  misc_feature (13)..(13): Phosphorothioate 3'-Internucleotide Linkage
  misc_feature (15)..(15): Phosphorothioate 3'-Internucleotide Linkage
  misc_feature (17)..(17): Phosphorothioate 3'-Internucleotide Linkage
  misc_feature (1)..(19): ribonucleotide modified as described
agcuucauaaggcgcaugctt

SEQ ID NO: 101 - DNA, 21 bp, Artificial Sequence
  Description of Artificial Sequence:  Synthetic
  misc_feature (1)..(5): Phosphorothioate 3'-Internucleotide Linkage
  misc_feature (1)..(19): ribonucleotide modified as described
agcuucauaaggcgcaugctt

SEQ ID NO: 102 - DNA, 21 bp, Artificial Sequence
  Description of Artificial Sequence:  Synthetic
  misc_feature (2)..(2): Phosphorothioate 3'-Internucleotide Linkage
  misc_feature (4)..(4): Phosphorothioate 3'-Internucleotide Linkage
  misc_feature (6)..(6): Phosphorothioate 3'-Internucleotide Linkage
  misc_feature (8)..(11): Phosphorothioate 3'-Internucleotide Linkage
  misc_feature (13)..(13): Phosphorothioate 3'-Internucleotide Linkage
  misc_feature (18)..(18): Phosphorothioate 3'-Internucleotide Linkage
  misc_feature (1)..(19): ribonucleotide modified as described
gcaugcgccuuaugaagcutt

SEQ ID NO: 103 - DNA, 21 bp, Artificial Sequence
  Description of Artificial Sequence:  Synthetic
  misc_feature (1)..(5): Phosphorothioate 3'-Internucleotide Linkage
  misc_feature (1)..(19): ribonucleotide modified as described
gcaugcgccuuaugaagcutt

SEQ ID NO: 104 - DNA, 21 bp, Artificial Sequence
  Description of Artificial Sequence:  Synthetic
  misc_feature (1)..(18): Phosphorothioate 3'-Internucleotide Linkage
  misc_feature (1)..(19): ribonucleotide modified as described
gcaugcgccuuaugaagcutt

SEQ ID NO: 105 - DNA, 21 bp, Artificial Sequence
  Description of Artificial Sequence:  Synthetic
  misc_feature (1)..(14): Phosphorothioate 3'-Internucleotide Linkage
  misc_feature (1)..(19): ribonucleotide modified as described
gcaugcgccuuaugaagcutt

SEQ ID NO: 106 - DNA, 21 bp, Artificial Sequence
  Description of Artificial Sequence:  Synthetic
  misc_feature (1)..(10): Phosphorothioate 3'-Internucleotide Linkage
  misc_feature (1)..(19): ribonucleotide modified as described
gcaugcgccuuaugaagcutt

SEQ ID NO: 107 - DNA, 21 bp, Artificial Sequence
  Description of Artificial Sequence:  Synthetic
  misc_feature (1)..(19): ribonucleotide modified as described
cagcacagacccagcugugtt

SEQ ID NO: 108 - DNA, 21 bp, Artificial Sequence
  Description of Artificial Sequence:  Synthetic
  misc_feature (1)..(19): ribonucleotide modified as described
cacagcugggucugugcugtt

SEQ ID NO: 109 - DNA, 21 bp, Artificial Sequence
  Description of Artificial Sequence:  Synthetic
  misc_feature (1)..(19): ribonucleotide modified as described
gugucgacccagacacgactt

SEQ ID NO: 110 - DNA, 21 bp, Artificial Sequence
  Description of Artificial Sequence:  Synthetic
  misc_feature (1)..(19): ribonucleotide modified as described
gucgugucugggucgacactt

SEQ ID NO: 111 - DNA, 21 bp, Artificial Sequence
  Description of Artificial Sequence:  Synthetic
  misc_feature (1)..(19): ribonucleotide modified as described
gcaggcuggagguaaggcctt

SEQ ID NO: 112 - DNA, 21 bp, Artificial Sequence
  Description of Artificial Sequence:  Synthetic
  misc_feature (1)..(19): ribonucleotide modified as described
ggccuuaccuccagccugctt

SEQ ID NO: 113 - DNA, 21 bp, Artificial Sequence
  Description of Artificial Sequence:  Synthetic
  misc_feature (1)..(19): ribonucleotide modified as described
ccggaauggaggucggacgtt

SEQ ID NO: 114 - DNA, 21 bp, Artificial Sequence
  Description of Artificial Sequence:  Synthetic
  misc_feature (1)..(19): ribonucleotide modified as described
cguccgaccuccauuccggtt

SEQ ID NO: 115 - DNA, 21 bp, Artificial Sequence
  Description of Artificial Sequence:  Synthetic
  misc_feature (1)..(19): ribonucleotide modified as described
gacuucuccuccauugcggtt

SEQ ID NO: 116 - DNA, 21 bp, Artificial Sequence
  Description of Artificial Sequence:  Synthetic
  misc_feature (1)..(19): ribonucleotide modified as described
ccgcaauggaggagaaguctt

SEQ ID NO: 117 - DNA, 21 bp, Artificial Sequence
  Description of Artificial Sequence:  Synthetic
  misc_feature (1)..(19): ribonucleotide modified as described
ggcguuaccuccucuucagtt

SEQ ID NO: 118 - DNA, 21 bp, Artificial Sequence
  Description of Artificial Sequence:  Synthetic
  misc_feature (1)..(19): ribonucleotide modified as described
cugaagaggagguaacgcctt

SEQ ID NO: 119 - DNA, 21 bp, Artificial Sequence
  Description of Artificial Sequence:  Synthetic
  misc_feature (1)..(19): ribonucleotide modified as described
cacugccgagcucaagauctt

SEQ ID NO: 120 - DNA, 21 bp, Artificial Sequence
  Description of Artificial Sequence:  Synthetic
  misc_feature (1)..(19): ribonucleotide modified as described
gaucuugagcucggcagugtt

SEQ ID NO: 121 - DNA, 21 bp, Artificial Sequence
  Description of Artificial Sequence:  Synthetic
  misc_feature (1)..(19): ribonucleotide modified as described
cuagaacucgagccgucactt

SEQ ID NO: 122 - DNA, 21 bp, Artificial Sequence
  Description of Artificial Sequence:  Synthetic
  misc_feature (1)..(19): ribonucleotide modified as described
gugacggcucgaguucuagtt

SEQ ID NO: 123 - DNA, 21 bp, Artificial Sequence
  Description of Artificial Sequence:  Synthetic
  misc_feature (1)..(19): ribonucleotide modified as described
ggaguuccucaugugcaagtt

SEQ ID NO: 124 - DNA, 21 bp, Artificial Sequence
  Description of Artificial Sequence:  Synthetic
  misc_feature (1)..(19): ribonucleotide modified as described
cuugcacaugaggaacucctt

SEQ ID NO: 125 - DNA, 21 bp, Artificial Sequence
  Description of Artificial Sequence:  Synthetic
  misc_feature (1)..(19): ribonucleotide modified as described
gaacguguacuccuugaggtt

SEQ ID NO: 126 - DNA, 21 bp, Artificial Sequence
  Description of Artificial Sequence:  Synthetic
  misc_feature (1)..(19): ribonucleotide modified as described
ccucaaggaguacacguuctt

SEQ ID NO: 127 - DNA, 21 bp, Artificial Sequence
  Description of Artificial Sequence:  Synthetic
  misc_feature (1)..(19): ribonucleotide modified as described
ucaagagcuccgagaugcctt

SEQ ID NO: 128 - DNA, 21 bp, Artificial Sequence
  Description of Artificial Sequence:  Synthetic
  misc_feature (1)..(19): ribonucleotide modified as described
ggcaucucggagcucuugatt

SEQ ID NO: 129 - DNA, 21 bp, Artificial Sequence
  Description of Artificial Sequence:  Synthetic
  misc_feature (1)..(19): ribonucleotide modified as described
ccguagagccucgagaacutt

SEQ ID NO: 130 - DNA, 21 bp, Artificial Sequence
  Description of Artificial Sequence:  Synthetic
  misc_feature (1)..(19): ribonucleotide modified as described
aguucucgaggcucuacggtt

SEQ ID NO: 131 - DNA, 21 bp, Artificial Sequence
  Description of Artificial Sequence:  Synthetic
  misc_feature (1)..(19): ribonucleotide modified as described
gcagauggcugaggacaagtt

SEQ ID NO: 132 - DNA, 21 bp, Artificial Sequence
  Description of Artificial Sequence:  Synthetic
  misc_feature (1)..(19): ribonucleotide modified as described
cuuguccucagccaucugctt

SEQ ID NO: 133 - DNA, 21 bp, Artificial Sequence
  Description of Artificial Sequence:  Synthetic
  misc_feature (1)..(19): ribonucleotide modified as described
gaacaggagucgguagacgtt

SEQ ID NO: 134 - DNA, 21 bp, Artificial Sequence
  Description of Artificial Sequence:  Synthetic
  misc_feature (1)..(19): ribonucleotide modified as described
cgucuaccgacuccuguuctt

SEQ ID NO: 135 - DNA, 52 bp, Artificial Sequence
  Description of Artificial Sequence:  Synthetic
aacguacgcggaauacuucgauuaaaaguaaucgaaguauuccgcguacguu

SEQ ID NO: 136 - DNA, 50 bp, Artificial Sequence
  Description of Artificial Sequence:  Synthetic
cguacgcggaauacuucgauuaaaaguaaucgaaguauuccgcguacguu

SEQ ID NO: 137 - DNA, 50 bp, Artificial Sequence
  Description of Artificial Sequence:  Synthetic
aacguacgcggaauacuucgauuaaagaaucgaaguauuccgcguacguu

SEQ ID NO: 138 - DNA, 48 bp, Artificial Sequence
  Description of Artificial Sequence:  Synthetic
cguacgcggaauacuucgauuaaagaaucgaaguauuccgcguacguu

SEQ ID NO: 139 - DNA, 47 bp, Artificial Sequence
  Description of Artificial Sequence:  Synthetic
cguacgcggaauacuucgauuguuaaucgaaguauuccgcguacguu

SEQ ID NO: 140 - DNA, 49 bp, Artificial Sequence
  Description of Artificial Sequence:  Synthetic
aacguacgcggaauacuucgauuguuaaucgaaguauuccgcguacguu

SEQ ID NO: 141 - DNA, 51 bp, Artificial Sequence
  Description of Artificial Sequence:  Synthetic
aacguacgcggaauacuucgauuaguuuaaucgaaguauuccgcguacguu

SEQ ID NO: 142 - DNA, 49 bp, Artificial Sequence
  Description of Artificial Sequence:  Synthetic
cguacgcggaauacuucgauuaguuuaaucgaaguauuccgcguacguu

SEQ ID NO: 143 - DNA, 21 bp, Artificial Sequence
  Description of Artificial Sequence:  Synthetic
  misc_feature (1)..(19): ribonucleotide modified as described
ccccgggaggucucguagatt

SEQ ID NO: 144 - DNA, 21 bp, Artificial Sequence
  Description of Artificial Sequence:  Synthetic
  misc_feature (1)..(19): ribonucleotide modified as described
cggaaccggugaguacacctt

SEQ ID NO: 145 - DNA, 21 bp, Artificial Sequence
  Description of Artificial Sequence:  Synthetic
  misc_feature (1)..(19): ribonucleotide modified as described
gccccgggaggucucguagtt

SEQ ID NO: 146 - DNA, 21 bp, Artificial Sequence
  Description of Artificial Sequence:  Synthetic
  misc_feature (1)..(19): ribonucleotide modified as described
ggaaccggugaguacaccgtt

SEQ ID NO: 147 - DNA, 21 bp, Artificial Sequence
  Description of Artificial Sequence:  Synthetic
  misc_feature (1)..(19): ribonucleotide modified as described
gugguacugccugauagggtt

SEQ ID NO: 148 - DNA, 21 bp, Artificial Sequence
  Description of Artificial Sequence:  Synthetic
  misc_feature (1)..(19): ribonucleotide modified as described
ugugguacugccugauaggtt

SEQ ID NO: 149 - DNA, 21 bp, Artificial Sequence
  Description of Artificial Sequence:  Synthetic
  misc_feature (1)..(19): ribonucleotide modified as described
uugugguacugccugauagtt

SEQ ID NO: 150 - DNA, 21 bp, Artificial Sequence
  Description of Artificial Sequence:  Synthetic
  misc_feature (1)..(19): ribonucleotide modified as described
ucuacgagaccucccggggtt

SEQ ID NO: 151 - DNA, 21 bp, Artificial Sequence
  Description of Artificial Sequence:  Synthetic
  misc_feature (1)..(19): ribonucleotide modified as described
gguguacucaccgguuccgtt

SEQ ID NO: 152 - DNA, 21 bp, Artificial Sequence
  Description of Artificial Sequence:  Synthetic
  misc_feature (1)..(19): ribonucleotide modified as described
cuacgagaccucccggggctt

SEQ ID NO: 153 - DNA, 21 bp, Artificial Sequence
  Description of Artificial Sequence:  Synthetic
  misc_feature (1)..(19): ribonucleotide modified as described
cgguguacucaccgguucctt

SEQ ID NO: 154 - DNA, 21 bp, Artificial Sequence
  Description of Artificial Sequence:  Synthetic
  misc_feature (1)..(19): ribonucleotide modified as described
cccuaucaggcaguaccactt

SEQ ID NO: 155 - DNA, 21 bp, Artificial Sequence
  Description of Artificial Sequence:  Synthetic
  misc_feature (1)..(19): ribonucleotide modified as described
ccuaucaggcaguaccacatt

SEQ ID NO: 156 - DNA, 21 bp, Artificial Sequence
  Description of Artificial Sequence:  Synthetic
  misc_feature (1)..(19): ribonucleotide modified as described
cuaucaggcaguaccacaatt

SEQ ID NO: 157 - DNA, 21 bp, Artificial Sequence
  Description of Artificial Sequence:  Synthetic
  misc_feature (3)..(21): ribonucleotide modified as described
ttagaugcucuggagggcccc

SEQ ID NO: 158 - DNA, 21 bp, Artificial Sequence
  Description of Artificial Sequence:  Synthetic
  misc_feature (3)..(21): ribonucleotide modified as described
ttccacaugaguggccaaggc

SEQ ID NO: 159 - DNA, 21 bp, Artificial Sequence
  Description of Artificial Sequence:  Synthetic
  misc_feature (3)..(21): ribonucleotide modified as described
ttgaugcucuggagggccccg

SEQ ID NO: 160 - DNA, 21 bp, Artificial Sequence
  Description of Artificial Sequence:  Synthetic
  misc_feature (3)..(21): ribonucleotide modified as described
ttgccacaugaguggccaagg

SEQ ID NO: 161 - DNA, 21 bp, Artificial Sequence
  Description of Artificial Sequence:  Synthetic
  misc_feature (3)..(21): ribonucleotide modified as described
ttgggauaguccgucauggug

SEQ ID NO: 162 - DNA, 21 bp, Artificial Sequence
  Description of Artificial Sequence:  Synthetic
  misc_feature (3)..(21): ribonucleotide modified as described
ttggauaguccgucauggugu

SEQ ID NO: 163 - DNA, 21 bp, Artificial Sequence
  Description of Artificial Sequence:  Synthetic
  misc_feature (3)..(21): ribonucleotide modified as described
ttgauaguccgucaugguguu

SEQ ID NO: 164 - DNA, 21 bp, Artificial Sequence
  Description of Artificial Sequence:  Synthetic
  misc_feature (3)..(21): ribonucleotide modified as described
ttggggcccuccagagcaucu

SEQ ID NO: 165 - DNA, 21 bp, Artificial Sequence
  Description of Artificial Sequence:  Synthetic
  misc_feature (3)..(21): ribonucleotide modified as described
ttgccuuggccacucaugugg

SEQ ID NO: 166 - DNA, 21 bp, Artificial Sequence
  Description of Artificial Sequence:  Synthetic
  misc_feature (3)..(21): ribonucleotide modified as described
ttcggggcccuccagagcauc

SEQ ID NO: 167 - DNA, 21 bp, Artificial Sequence
  Description of Artificial Sequence:  Synthetic
  misc_feature (3)..(21): ribonucleotide modified as described
ttccuuggccacucauguggc

SEQ ID NO: 168 - DNA, 21 bp, Artificial Sequence
  Description of Artificial Sequence:  Synthetic
  misc_feature (3)..(21): ribonucleotide modified as described
ttcaccaugacggacuauccc

SEQ ID NO: 169 - DNA, 21 bp, Artificial Sequence
  Description of Artificial Sequence:  Synthetic
  misc_feature (3)..(21): ribonucleotide modified as described
ttacaccaugacggacuaucc

SEQ ID NO: 170 - DNA, 21 bp, Artificial Sequence
  Description of Artificial Sequence:  Synthetic
  misc_feature (3)..(21): ribonucleotide modified as described
ttaacaccaugacggacuauc

SEQ ID NO: 171 - DNA, 21 bp, Artificial Sequence
  Description of Artificial Sequence:  Synthetic
  misc_feature (1)..(5): Phosphorothioate 3'-Internucleotide Linkage
  misc_feature (1)..(19): ribonucleotide modified as described
  misc_feature (20)..(20): Phosphorothioate 3'-Internucleotide Linkage
agcuucauaaggcgcaugctt

SEQ ID NO: 172 - DNA, 21 bp, Artificial Sequence
  Description of Artificial Sequence:  Synthetic
  misc_feature (1)..(5): Phosphorothioate 3'-Internucleotide Linkage
  misc_feature (1)..(19): ribonucleotide modified as described
  misc_feature (20)..(20): Phosphorothioate 3'-Internucleotide Linkage
gcaugcgccuuaugaagcutt

SEQ ID NO: 173 - DNA, 21 bp, Artificial Sequence
  Description of Artificial Sequence:  Synthetic
  misc_feature (1)..(5): Phosphorothioate 3'-Internucleotide Linkage
  misc_feature (1)..(19): ribonucleotide modified as described
  misc_feature (20)..(20): Phosphorothioate 3'-Internucleotide Linkage
cguacgcggaauacuucgatt

SEQ ID NO: 174 - DNA, 21 bp, Artificial Sequence
  Description of Artificial Sequence:  Synthetic
  misc_feature (1)..(5): Phosphorothioate 3'-Internucleotide Linkage
  misc_feature (1)..(19): ribonucleotide modified as described
  misc_feature (20)..(20): Phosphorothioate 3'-Internucleotide Linkage
ucgaaguauuccgcguacgtt

SEQ ID NO: 175 - DNA, 42 bp, Artificial Sequence
  Description of Artificial Sequence:  Synthetic
  misc_feature (1)..(19): ribonucleotide modified as described
  misc_feature (21)..(21): inverted deoxyabasic
  misc_feature (23)..(40): ribonucleotide modified as described
cguacgcggaauacuucgattucgaaguauuccgcguacgtt

SEQ ID NO: 176 - DNA, 21 bp, Artificial Sequence
  Description of Artificial Sequence:  Synthetic
  misc_feature (1)..(19): ribonucleotide modified as described
gucuagacucgugguggactt

SEQ ID NO: 177 - DNA, 21 bp, Artificial Sequence
  Description of Artificial Sequence:  Synthetic
  misc_feature (1)..(19): ribonucleotide modified as described
ccugcugcuaugccucauctt

SEQ ID NO: 178 - DNA, 21 bp, Artificial Sequence
  Description of Artificial Sequence:  Synthetic
  misc_feature (1)..(19): ribonucleotide modified as described
caagccuccaagcugugcctt

SEQ ID NO: 179 - DNA, 21 bp, Artificial Sequence
  Description of Artificial Sequence:  Synthetic
  misc_feature (1)..(19): ribonucleotide modified as described
agcugugccuuggguggcutt

SEQ ID NO: 180 - DNA, 21 bp, Artificial Sequence
  Description of Artificial Sequence:  Synthetic
  misc_feature (1)..(19): ribonucleotide modified as described
guccaccacgagucuagactt

SEQ ID NO: 181 - DNA, 21 bp, Artificial Sequence
  Description of Artificial Sequence:  Synthetic
  misc_feature (1)..(19): ribonucleotide modified as described
gaugaggcauagcagcaggtt

SEQ ID NO: 182 - DNA, 21 bp, Artificial Sequence
  Description of Artificial Sequence:  Synthetic
  misc_feature (1)..(19): ribonucleotide modified as described
ggcacagcuuggaggcuugtt

SEQ ID NO: 183 - DNA, 21 bp, Artificial Sequence
  Description of Artificial Sequence:  Synthetic
  misc_feature (1)..(19): ribonucleotide modified as described
agccacccaaggcacagcutt

SEQ ID NO: 184 - DNA, 21 bp, Artificial Sequence
  Description of Artificial Sequence:  Synthetic
  misc_feature (1)..(19): ribonucleotide modified as described
cagguggugcucagaucugtt

SEQ ID NO: 185 - DNA, 21 bp, Artificial Sequence
  Description of Artificial Sequence:  Synthetic
  misc_feature (1)..(19): ribonucleotide modified as described
cuacuccguaucgucgucctt

SEQ ID NO: 186 - DNA, 21 bp, Artificial Sequence
  Description of Artificial Sequence:  Synthetic
  misc_feature (1)..(19): ribonucleotide modified as described
ccgugucgaaccuccgaactt

SEQ ID NO: 187 - DNA, 21 bp, Artificial Sequence
  Description of Artificial Sequence:  Synthetic
  misc_feature (1)..(19): ribonucleotide modified as described
ucgguggguuccgugucgatt

SEQ ID NO: 188 - DNA, 21 bp, Artificial Sequence
  Description of Artificial Sequence:  Synthetic
  misc_feature (1)..(19): ribonucleotide modified as described
cagaucugagcaccaccugtt

SEQ ID NO: 189 - DNA, 21 bp, Artificial Sequence
  Description of Artificial Sequence:  Synthetic
  misc_feature (1)..(19): ribonucleotide modified as described
ggacgacgauacggaguagtt

SEQ ID NO: 190 - DNA, 21 bp, Artificial Sequence
  Description of Artificial Sequence:  Synthetic
  misc_feature (1)..(19): ribonucleotide modified as described
guucggagguucgacacggtt

SEQ ID NO: 191 - DNA, 21 bp, Artificial Sequence
  Description of Artificial Sequence:  Synthetic
  misc_feature (1)..(19): ribonucleotide modified as described
ucgacacggaacccaccgatt

SEQ ID NO: 192 - DNA, 21 bp, Artificial Sequence
  Description of Artificial Sequence:  Synthetic
cggaaccggugaguacaccgg

SEQ ID NO: 193 - DNA, 21 bp, Artificial Sequence
  Description of Artificial Sequence:  Synthetic
ggaaccggugaguacaccgga

SEQ ID NO: 194 - DNA, 21 bp, Artificial Sequence
  Description of Artificial Sequence:  Synthetic
uugugguacugccugauaggg

SEQ ID NO: 195 - DNA, 21 bp, Artificial Sequence
  Description of Artificial Sequence:  Synthetic
ugugguacugccugauagggu

SEQ ID NO: 196 - DNA, 21 bp, Artificial Sequence
  Description of Artificial Sequence:  Synthetic
gugguacugccugauagggug

SEQ ID NO: 197 - DNA, 21 bp, Artificial Sequence
  Description of Artificial Sequence:  Synthetic
gccccgggaggucucguagac

SEQ ID NO: 198 - DNA, 21 bp, Artificial Sequence
  Description of Artificial Sequence:  Synthetic
ccccgggaggucucguagacc

SEQ ID NO: 199 - DNA, 21 bp, Artificial Sequence
  Description of Artificial Sequence:  Synthetic
gguguacucaccgguuccgca

SEQ ID NO: 200 - DNA, 21 bp, Artificial Sequence
  Description of Artificial Sequence:  Synthetic
cgguguacucaccgguuccgc

SEQ ID NO: 201 - DNA, 21 bp, Artificial Sequence
  Description of Artificial Sequence:  Synthetic
cuaucaggcaguaccacaagg

SEQ ID NO: 202 - DNA, 21 bp, Artificial Sequence
  Description of Artificial Sequence:  Synthetic
ccuaucaggcaguaccacaag

SEQ ID NO: 203 - DNA, 21 bp, Artificial Sequence
  Description of Artificial Sequence:  Synthetic
cccuaucaggcaguaccacaa

SEQ ID NO: 204 - DNA, 21 bp, Artificial Sequence
  Description of Artificial Sequence:  Synthetic
cuacgagaccucccggggcac

SEQ ID NO: 205 - DNA, 21 bp, Artificial Sequence
  Description of Artificial Sequence:  Synthetic
ucuacgagaccucccggggca

SEQ ID NO: 206 - DNA, 21 bp, Artificial Sequence
  Description of Artificial Sequence:  Synthetic
ggccacaugaguggccaaggc

SEQ ID NO: 207 - DNA, 21 bp, Artificial Sequence
  Description of Artificial Sequence:  Synthetic
aggccacaugaguggccaagg

SEQ ID NO: 208 - DNA, 21 bp, Artificial Sequence
  Description of Artificial Sequence:  Synthetic
gggauaguccgucaugguguu

SEQ ID NO: 209 - DNA, 21 bp, Artificial Sequence
  Description of Artificial Sequence:  Synthetic
ugggauaguccgucauggugu

SEQ ID NO: 210 - DNA, 21 bp, Artificial Sequence
  Description of Artificial Sequence:  Synthetic
gugggauaguccgucauggug

SEQ ID NO: 211 - DNA, 21 bp, Artificial Sequence
  Description of Artificial Sequence:  Synthetic
cagaugcucuggagggccccg

SEQ ID NO: 212 - DNA, 21 bp, Artificial Sequence
  Description of Artificial Sequence:  Synthetic
ccagaugcucuggagggcccc

SEQ ID NO: 213 - DNA, 21 bp, Artificial Sequence
  Description of Artificial Sequence:  Synthetic
acgccuuggccacucaugugg

SEQ ID NO: 214 - DNA, 21 bp, Artificial Sequence
  Description of Artificial Sequence:  Synthetic
cgccuuggccacucauguggc

SEQ ID NO: 215 - DNA, 21 bp, Artificial Sequence
  Description of Artificial Sequence:  Synthetic
ggaacaccaugacggacuauc

SEQ ID NO: 216 - DNA, 21 bp, Artificial Sequence
  Description of Artificial Sequence:  Synthetic
gaacaccaugacggacuaucc

SEQ ID NO: 217 - DNA, 21 bp, Artificial Sequence
  Description of Artificial Sequence:  Synthetic
aacaccaugacggacuauccc

SEQ ID NO: 218 - DNA, 21 bp, Artificial Sequence
  Description of Artificial Sequence:  Synthetic
cacggggcccuccagagcauc

SEQ ID NO: 219 - DNA, 21 bp, Artificial Sequence
  Description of Artificial Sequence:  Synthetic
acggggcccuccagagcaucu

SEQ ID NO: 220 - DNA, 21 bp, Artificial Sequence
  Description of Artificial Sequence:  Synthetic
cagaugcacauaucgagguga

SEQ ID NO: 221 - DNA, 21 bp, Artificial Sequence
  Description of Artificial Sequence:  Synthetic
cagaugcacauaucgaggugg

SEQ ID NO: 222 - DNA, 21 bp, Artificial Sequence
  Description of Artificial Sequence:  Synthetic
  misc_feature (1)..(19): ribonucleotide modified as described
cagaugcacauaucgaggutt

SEQ ID NO: 223 - DNA, 21 bp, Artificial Sequence
  Description of Artificial Sequence:  Synthetic
accucgauaugugcaucugua

SEQ ID NO: 224 - DNA, 21 bp, Artificial Sequence
  Description of Artificial Sequence:  Synthetic
  misc_feature (1)..(19): ribonucleotide modified as described
accucgauaugugcaucugtt

SEQ ID NO: 225 - DNA, 21 bp, Artificial Sequence
  Description of Artificial Sequence:  Synthetic
uacuucgaaauguccguucgg

SEQ ID NO: 226 - DNA, 21 bp, Artificial Sequence
  Description of Artificial Sequence:  Synthetic
  misc_feature (1)..(19): ribonucleotide modified as described
uacuucgaaauguccguuctt

SEQ ID NO: 227 - DNA, 21 bp, Artificial Sequence
  Description of Artificial Sequence:  Synthetic
gaacggacauuucgaaguauu

SEQ ID NO: 228 - DNA, 21 bp, Artificial Sequence
  Description of Artificial Sequence:  Synthetic
gaacggacauuucgaaguacu

SEQ ID NO: 229 - DNA, 21 bp, Artificial Sequence
  Description of Artificial Sequence:  Synthetic
  misc_feature (1)..(19): ribonucleotide modified as described
gaacggacauuucgaaguatt

SEQ ID NO: 230 - DNA, 21 bp, Artificial Sequence
  Description of Artificial Sequence:  Synthetic
acuucgaaauguccguucggu

SEQ ID NO: 231 - DNA, 21 bp, Artificial Sequence
  Description of Artificial Sequence:  Synthetic
  misc_feature (1)..(19): ribonucleotide modified as described
acuucgaaauguccguucgtt

SEQ ID NO: 232 - DNA, 21 bp, Artificial Sequence
  Description of Artificial Sequence:  Synthetic
cgaacggacauuucgaaguau

SEQ ID NO: 233 - DNA, 21 bp, Artificial Sequence
  Description of Artificial Sequence:  Synthetic
cgaacggacauuucgaaguac

SEQ ID NO: 234 - DNA, 21 bp, Artificial Sequence
  Description of Artificial Sequence:  Synthetic
  misc_feature (1)..(19): ribonucleotide modified as described
cgaacggacauuucgaagutt

SEQ ID NO: 235 - DNA, 21 bp, Artificial Sequence
  Description of Artificial Sequence:  Synthetic
agauucucgcaugccagagau

SEQ ID NO: 236 - DNA, 21 bp, Artificial Sequence
  Description of Artificial Sequence:  Synthetic
  misc_feature (1)..(19): ribonucleotide modified as described
agauucucgcaugccagagtt

SEQ ID NO: 237 - DNA, 21 bp, Artificial Sequence
  Description of Artificial Sequence:  Synthetic
cucuggcaugcgagaaucuga

SEQ ID NO: 238 - DNA, 21 bp, Artificial Sequence
  Description of Artificial Sequence:  Synthetic
cucuggcaugcgagaaucuca

SEQ ID NO: 239 - DNA, 21 bp, Artificial Sequence
  Description of Artificial Sequence:  Synthetic
  misc_feature (1)..(19): ribonucleotide modified as described
cucuggcaugcgagaaucutt

SEQ ID NO: 240 - DNA, 21 bp, Artificial Sequence
  Description of Artificial Sequence:  Synthetic
gauucucgcaugccagagauc

SEQ ID NO: 241 - DNA, 21 bp, Artificial Sequence
  Description of Artificial Sequence:  Synthetic
  misc_feature (1)..(19): ribonucleotide modified as described
gauucucgcaugccagagatt

SEQ ID NO: 242 - DNA, 21 bp, Artificial Sequence
  Description of Artificial Sequence:  Synthetic
ucucuggcaugcgagaaucug

SEQ ID NO: 243 - DNA, 21 bp, Artificial Sequence
  Description of Artificial Sequence:  Synthetic
ucucuggcaugcgagaaucuc

SEQ ID NO: 244 - DNA, 21 bp, Artificial Sequence
  Description of Artificial Sequence:  Synthetic
  misc_feature (1)..(19): ribonucleotide modified as described
ucucuggcaugcgagaauctt

SEQ ID NO: 245 - DNA, 21 bp, Artificial Sequence
  Description of Artificial Sequence:  Synthetic
uucuucgccaaaagcacucug

SEQ ID NO: 246 - DNA, 21 bp, Artificial Sequence
  Description of Artificial Sequence:  Synthetic
  misc_feature (1)..(19): ribonucleotide modified as described
uucuucgccaaaagcacuctt

SEQ ID NO: 247 - DNA, 21 bp, Artificial Sequence
  Description of Artificial Sequence:  Synthetic
gagugcuuuuggcgaagaaug

SEQ ID NO: 248 - DNA, 21 bp, Artificial Sequence
  Description of Artificial Sequence:  Synthetic
gagugcuuuuggcgaagaagg

SEQ ID NO: 249 - DNA, 21 bp, Artificial Sequence
  Description of Artificial Sequence:  Synthetic
  misc_feature (1)..(19): ribonucleotide modified as described
gagugcuuuuggcgaagaatt

SEQ ID NO: 250 - DNA, 21 bp, Artificial Sequence
  Description of Artificial Sequence:  Synthetic
caaggauaugggcucacugag

SEQ ID NO: 251 - DNA, 21 bp, Artificial Sequence
  Description of Artificial Sequence:  Synthetic
  misc_feature (1)..(19): ribonucleotide modified as described
caaggauaugggcucacugtt

SEQ ID NO: 252 - DNA, 21 bp, Artificial Sequence
  Description of Artificial Sequence:  Synthetic
cagugagcccauauccuuguc

SEQ ID NO: 253 - DNA, 21 bp, Artificial Sequence
  Description of Artificial Sequence:  Synthetic
cagugagcccauauccuugcc

SEQ ID NO: 254 - DNA, 21 bp, Artificial Sequence
  Description of Artificial Sequence:  Synthetic
  misc_feature (1)..(19): ribonucleotide modified as described
cagugagcccauauccuugtt

SEQ ID NO: 255 - DNA, 21 bp, Artificial Sequence
  Description of Artificial Sequence:  Synthetic
aaacgcugggcguuaaucaga

SEQ ID NO: 256 - DNA, 21 bp, Artificial Sequence
  Description of Artificial Sequence:  Synthetic
aaacgcugggcguuaaucaaa

SEQ ID NO: 257 - DNA, 21 bp, Artificial Sequence
  Description of Artificial Sequence:  Synthetic
  misc_feature (1)..(19): ribonucleotide modified as described
aaacgcugggcguuaaucatt

SEQ ID NO: 258 - DNA, 21 bp, Artificial Sequence
  Description of Artificial Sequence:  Synthetic
ugauuaacgcccagcguuuuc

SEQ ID NO: 259 - DNA, 21 bp, Artificial Sequence
  Description of Artificial Sequence:  Synthetic
  misc_feature (1)..(19): ribonucleotide modified as described
ugauuaacgcccagcguuutt

SEQ ID NO: 260 - DNA, 21 bp, Artificial Sequence
  Description of Artificial Sequence:  Synthetic
aagacgaacacuucuucauag

SEQ ID NO: 261 - DNA, 21 bp, Artificial Sequence
  Description of Artificial Sequence:  Synthetic
aagacgaacacuucuucaucg

SEQ ID NO: 262 - DNA, 21 bp, Artificial Sequence
  Description of Artificial Sequence:  Synthetic
  misc_feature (1)..(19): ribonucleotide modified as described
aagacgaacacuucuucautt

SEQ ID NO: 263 - DNA, 21 bp, Artificial Sequence
  Description of Artificial Sequence:  Synthetic
augaagaaguguucgucuucg

SEQ ID NO: 264 - DNA, 21 bp, Artificial Sequence
  Description of Artificial Sequence:  Synthetic
  misc_feature (1)..(19): ribonucleotide modified as described
augaagaaguguucgucuutt

SEQ ID NO: 265 - DNA, 21 bp, Artificial Sequence
  Description of Artificial Sequence:  Synthetic
aagagaucguggauuacgugg

SEQ ID NO: 266 - DNA, 21 bp, Artificial Sequence
  Description of Artificial Sequence:  Synthetic
aagagaucguggauuacgucg

SEQ ID NO: 267 - DNA, 21 bp, Artificial Sequence
  Description of Artificial Sequence:  Synthetic
  misc_feature (1)..(19): ribonucleotide modified as described
aagagaucguggauuacgutt

SEQ ID NO: 268 - DNA, 21 bp, Artificial Sequence
  Description of Artificial Sequence:  Synthetic
acguaauccacgaucucuuuu

SEQ ID NO: 269 - DNA, 21 bp, Artificial Sequence
  Description of Artificial Sequence:  Synthetic
  misc_feature (1)..(19): ribonucleotide modified as described
acguaauccacgaucucuutt

SEQ ID NO: 270 - DNA, 21 bp, Artificial Sequence
  Description of Artificial Sequence:  Synthetic
aggccaagaagggcggaaagu

SEQ ID NO: 271 - DNA, 21 bp, Artificial Sequence
  Description of Artificial Sequence:  Synthetic
aggccaagaagggcggaaaga

SEQ ID NO: 272 - DNA, 21 bp, Artificial Sequence
  Description of Artificial Sequence:  Synthetic
  misc_feature (1)..(19): ribonucleotide modified as described
aggccaagaagggcggaaatt

SEQ ID NO: 273 - DNA, 21 bp, Artificial Sequence
  Description of Artificial Sequence:  Synthetic
uuuccgcccuucuuggccuuu

SEQ ID NO: 274 - DNA, 21 bp, Artificial Sequence
  Description of Artificial Sequence:  Synthetic
  misc_feature (1)..(19): ribonucleotide modified as described
uuuccgcccuucuuggccutt

SEQ ID NO: 275 - DNA, 21 bp, Artificial Sequence
  Description of Artificial Sequence:  Synthetic
ggccaagaagggcggaaaguc

SEQ ID NO: 276 - DNA, 21 bp, Artificial Sequence
  Description of Artificial Sequence:  Synthetic
ggccaagaagggcggaaagau

SEQ ID NO: 277 - DNA, 21 bp, Artificial Sequence
  Description of Artificial Sequence:  Synthetic
  misc_feature (1)..(19): ribonucleotide modified as described
ggccaagaagggcggaaagtt

SEQ ID NO: 278 - DNA, 21 bp, Artificial Sequence
  Description of Artificial Sequence:  Synthetic
cuuuccgcccuucuuggccuu

SEQ ID NO: 279 - DNA, 21 bp, Artificial Sequence
  Description of Artificial Sequence:  Synthetic
  misc_feature (1)..(19): ribonucleotide modified as described
cuuuccgcccuucuuggcctt

SEQ ID NO: 280 - DNA, 21 bp, Artificial Sequence
  Description of Artificial Sequence:  Synthetic
  misc_feature (1)..(2): Phosphorothioate 3'-Internucleotide Linkage
  misc_feature (7)..(7): Phosphorothioate 3'-Internucleotide Linkage
  misc_feature (9)..(12): Phosphorothioate 3'-Internucleotide Linkage
  misc_feature (14)..(14): Phosphorothioate 3'-Internucleotide Linkage
  misc_feature (16)..(16): Phosphorothioate 3'-Internucleotide Linkage
  misc_feature (18)..(18): Phosphorothioate 3'-Internucleotide Linkage
  misc_feature (20)..(20): u stands for 5-bromodeoxyuridine
  misc_feature (20)..(20): Phosphorothioate 3'-Internucleotide Linkage
  misc_feature (1)..(20): ribonucleotide modified as described
ucgaaguauuccgcguacgut

SEQ ID NO: 281 - DNA, 21 bp, Artificial Sequence
  Description of Artificial Sequence:  Synthetic
  misc_feature (1)..(1): Phosphorothioate 3'-Internucleotide Linkage
  misc_feature (3)..(3): Phosphorothioate 3'-Internucleotide Linkage
  misc_feature (5)..(5): Phosphorothioate 3'-Internucleotide Linkage
  misc_feature (7)..(7): Phosphorothioate 3'-Internucleotide Linkage
  misc_feature (12)..(12): Phosphorothioate 3'-Internucleotide Linkage
  misc_feature (14)..(17): Phosphorothioate 3'-Internucleotide Linkage
  misc_feature (20)..(20): u stands for 5-bromodeoxyuridine
  misc_feature (20)..(20): Phosphorothioate 3'-Internucleotide Linkage
  misc_feature (1)..(20): ribonucleotide modified as described
cguacgcggaauacuucgaut

SEQ ID NO: 282 - DNA, 21 bp, Artificial Sequence
  Description of Artificial Sequence:  Synthetic
  misc_feature (1)..(5): Phosphorothioate 3'-Internucleotide Linkage
  misc_feature (20)..(20): u stands for 5-bromodeoxyuridine
  misc_feature (20)..(20): Phosphorothioate 3'-Internucleotide Linkage
  misc_feature (1)..(20): ribonucleotide modified as described
cguacgcggaauacuucgaut

SEQ ID NO: 283 - DNA, 21 bp, Artificial Sequence
  Description of Artificial Sequence:  Synthetic
  misc_feature (1)..(5): Phosphorothioate 3'-Internucleotide Linkage
  misc_feature (20)..(20): u stands for 5-bromodeoxyuridine
  misc_feature (20)..(20): Phosphorothioate 3'-Internucleotide Linkage
  misc_feature (1)..(20): ribonucleotide modified as described
ucgaaguauuccgcguacgut

SEQ ID NO: 284 - DNA, 21 bp, Artificial Sequence
  Description of Artificial Sequence:  Synthetic
  misc_feature (1)..(1): Phosphorothioate 3'-Internucleotide Linkage
  misc_feature (3)..(3): Phosphorothioate 3'-Internucleotide Linkage
  misc_feature (5)..(5): Phosphorothioate 3'-Internucleotide Linkage
  misc_feature (7)..(7): Phosphorothioate 3'-Internucleotide Linkage
  misc_feature (12)..(12): Phosphorothioate 3'-Internucleotide Linkage
  misc_feature (14)..(17): Phosphorothioate 3'-Internucleotide Linkage
  misc_feature (1)..(19): ribonucleotide modified as described
  misc_feature (20)..(20): Phosphorothioate 3'-Internucleotide Linkage
  misc_feature (21)..(21): inverted deoxyabasic
cguacgcggaauacuucgatt

SEQ ID NO: 285 - DNA, 21 bp, Artificial Sequence
  Description of Artificial Sequence:  Synthetic
  misc_feature (1)..(1): inverted deoxyabasic
  misc_feature (1)..(1): Phosphorothioate 3'-Internucleotide Linkage
  misc_feature (3)..(3): Phosphorothioate 3'-Internucleotide Linkage
  misc_feature (5)..(5): Phosphorothioate 3'-Internucleotide Linkage
  misc_feature (7)..(7): Phosphorothioate 3'-Internucleotide Linkage
  misc_feature (12)..(12): Phosphorothioate 3'-Internucleotide Linkage
  misc_feature (14)..(17): Phosphorothioate 3'-Internucleotide Linkage
  misc_feature (1)..(19): ribonucleotide modified as described
  misc_feature (20)..(20): Phosphorothioate 3'-Internucleotide Linkage
  misc_feature (21)..(21): inverted deoxyabasic
cguacgcggaauacuucgatt

SEQ ID NO: 286 - DNA, 21 bp, Artificial Sequence
  Description of Artificial Sequence:  Synthetic
  misc_feature (1)..(1): inverted deoxyabasic
  misc_feature (1)..(1): Phosphorothioate 3'-Internucleotide Linkage
  misc_feature (3)..(3): Phosphorothioate 3'-Internucleotide Linkage
  misc_feature (5)..(5): Phosphorothioate 3'-Internucleotide Linkage
  misc_feature (7)..(7): Phosphorothioate 3'-Internucleotide Linkage
  misc_feature (12)..(12): Phosphorothioate 3'-Internucleotide Linkage
  misc_feature (14)..(17): Phosphorothioate 3'-Internucleotide Linkage
  misc_feature (1)..(19): ribonucleotide modified as described
  misc_feature (20)..(20): Phosphorothioate 3'-Internucleotide Linkage
cguacgcggaauacuucgatt

SEQ ID NO: 287 - DNA, 21 bp, Artificial Sequence
  Description of Artificial Sequence:  Synthetic
  misc_feature (1)..(2): Phosphorothioate 3'-Internucleotide Linkage
  misc_feature (7)..(7): Phosphorothioate 3'-Internucleotide Linkage
  misc_feature (9)..(12): Phosphorothioate 3'-Internucleotide Linkage
  misc_feature (14)..(14): Phosphorothioate 3'-Internucleotide Linkage
  misc_feature (16)..(16): Phosphorothioate 3'-Internucleotide Linkage
  misc_feature (18)..(18): Phosphorothioate 3'-Internucleotide Linkage
  misc_feature (1)..(19): ribonucleotide modified as described
  misc_feature (20)..(20): Phosphorothioate 3'-Internucleotide Linkage
  misc_feature (21)..(21): inverted deoxyabasic
ucgaaguauuccgcguacgtt

SEQ ID NO: 288 - DNA, 21 bp, Artificial Sequence
  Description of Artificial Sequence:  Synthetic
  misc_feature (1)..(1): inverted deoxyabasic
  misc_feature (1)..(2): Phosphorothioate 3'-Internucleotide Linkage
  misc_feature (7)..(7): Phosphorothioate 3'-Internucleotide Linkage
  misc_feature (9)..(12): Phosphorothioate 3'-Internucleotide Linkage
  misc_feature (14)..(14): Phosphorothioate 3'-Internucleotide Linkage
  misc_feature (16)..(16): Phosphorothioate 3'-Internucleotide Linkage
  misc_feature (18)..(18): Phosphorothioate 3'-Internucleotide Linkage
  misc_feature (1)..(19): ribonucleotide modified as described
  misc_feature (20)..(20): Phosphorothioate 3'-Internucleotide Linkage
  misc_feature (21)..(21): inverted deoxyabasic
ucgaaguauuccgcguacgtt

SEQ ID NO: 289 - DNA, 21 bp, Artificial Sequence
  Description of Artificial Sequence:  Synthetic
  misc_feature (1)..(1): inverted deoxyabasic
  misc_feature (1)..(2): Phosphorothioate 3'-Internucleotide Linkage
  misc_feature (7)..(7): Phosphorothioate 3'-Internucleotide Linkage
  misc_feature (9)..(12): Phosphorothioate 3'-Internucleotide Linkage
  misc_feature (14)..(14): Phosphorothioate 3'-Internucleotide Linkage
  misc_feature (16)..(16): Phosphorothioate 3'-Internucleotide Linkage
  misc_feature (18)..(18): Phosphorothioate 3'-Internucleotide Linkage
  misc_feature (1)..(19): ribonucleotide modified as described
  misc_feature (20)..(20): Phosphorothioate 3'-Internucleotide Linkage
ucgaaguauuccgcguacgtt

SEQ ID NO: 290 - DNA, 42 bp, Artificial Sequence
  Description of Artificial Sequence:  Synthetic
  misc_feature (1)..(19): ribonucleotide modified as described
  misc_feature (21)..(21): inverted deoxyabasic succinate linker
  misc_feature (23)..(40): ribonucleotide modified as described
ucgaaguauuccgcguacgttcguacgcggaauacuucgatt

SEQ ID NO: 291 - RNA, 6 nt, Artificial Sequence
  Description of Artificial Sequence:  Synthetic
  misc_feature (1)..(5): Phosphorothioate 3'-Internucleotide Linkage
cguacg

SEQ ID NO: 292 - DNA, 15 bp, Artificial Sequence
  Description of Artificial Sequence:  Synthetic
  misc_feature (1)..(13): ribonucleotide modified as described
  misc_feature (14)..(14): Phosphorothioate 3'-Internucleotide Linkage
cggaauacuucgatt

SEQ ID NO: 293 - RNA, 8 nt, Artificial Sequence
  Description of Artificial Sequence:  Synthetic
  misc_feature (1)..(5): Phosphorothioate 3'-Internucleotide Linkage
ucgaagua

SEQ ID NO: 294 - DNA, 13 bp, Artificial Sequence
  Description of Artificial Sequence:  Synthetic
  misc_feature (1)..(11): ribonucleotide modified as described
  misc_feature (12)..(12): Phosphorothioate 3'-Internucleotide Linkage
uuccgcguacgtt

SEQ ID NO: 295 - RNA, 8 nt, Artificial Sequence
  Description of Artificial Sequence:  Synthetic
  misc_feature (1)..(7): Phosphorothioate 3'-Internucleotide Linkage
ucgaagua

SEQ ID NO: 296 - DNA, 13 bp, Artificial Sequence
  Description of Artificial Sequence:  Synthetic
  misc_feature (1)..(12): Phosphorothioate 3'-Internucleotide Linkage
  misc_feature (1)..(11): ribonucleotide modified as described
uuccgcguacgtt

SEQ ID NO: 297 - DNA, 21 bp, Artificial Sequence
  Description of Artificial Sequence:  Synthetic
  misc_feature (1)..(5): Phosphorothioate 3'-Internucleotide Linkage
  misc_feature (1)..(19): ribonucleotide modified as described
  misc_feature (20)..(20): Phosphorothioate 3'-Internucleotide Linkage
cugaguuuaaaaggcaccctt

SEQ ID NO: 298 - DNA, 21 bp, Artificial Sequence
  Description of Artificial Sequence:  Synthetic
  misc_feature (1)..(5): Phosphorothioate 3'-Internucleotide Linkage
  misc_feature (1)..(19): ribonucleotide modified as described
  misc_feature (20)..(20): Phosphorothioate 3'-Internucleotide Linkage
caaccacaaaauacaacaatt

SEQ ID NO: 299 - DNA, 21 bp, Artificial Sequence
  Description of Artificial Sequence:  Synthetic
  misc_feature (1)..(5): Phosphorothioate 3'-Internucleotide Linkage
  misc_feature (1)..(19): ribonucleotide modified as described
  misc_feature (20)..(20): Phosphorothioate 3'-Internucleotide Linkage
ccuggaaagaaucaaaacctt

SEQ ID NO: 300 - DNA, 21 bp, Artificial Sequence
  Description of Artificial Sequence:  Synthetic
  misc_feature (1)..(5): Phosphorothioate 3'-Internucleotide Linkage
  misc_feature (1)..(19): ribonucleotide modified as described
  misc_feature (20)..(20): Phosphorothioate 3'-Internucleotide Linkage
gcaaggagggccucugaugtt

SEQ ID NO: 301 - DNA, 21 bp, Artificial Sequence
  Description of Artificial Sequence:  Synthetic
  misc_feature (1)..(5): Phosphorothioate 3'-Internucleotide Linkage
  misc_feature (1)..(19): ribonucleotide modified as described
  misc_feature (20)..(20): Phosphorothioate 3'-Internucleotide Linkage
gggugccuuuuaaacucagtt

SEQ ID NO: 302 - DNA, 21 bp, Artificial Sequence
  Description of Artificial Sequence:  Synthetic
  misc_feature (1)..(5): Phosphorothioate 3'-Internucleotide Linkage
  misc_feature (1)..(19): ribonucleotide modified as described
  misc_feature (20)..(20): Phosphorothioate 3'-Internucleotide Linkage
uuguuguauuuugugguugtt

SEQ ID NO: 303 - DNA, 21 bp, Artificial Sequence
  Description of Artificial Sequence:  Synthetic
  misc_feature (1)..(5): Phosphorothioate 3'-Internucleotide Linkage
  misc_feature (1)..(19): ribonucleotide modified as described
  misc_feature (20)..(20): Phosphorothioate 3'-Internucleotide Linkage
gguuuugauucuuuccaggtt

SEQ ID NO: 304 - DNA, 21 bp, Artificial Sequence
  Description of Artificial Sequence:  Synthetic
  misc_feature (1)..(5): Phosphorothioate 3'-Internucleotide Linkage
  misc_feature (1)..(19): ribonucleotide modified as described
  misc_feature (20)..(20): Phosphorothioate 3'-Internucleotide Linkage
caucagaggcccuccuugctt

SEQ ID NO: 305 - DNA, 21 bp, Artificial Sequence
  Description of Artificial Sequence:  Synthetic
  misc_feature (1)..(20): Phosphorothioate 3'-Internucleotide Linkage
  misc_feature (1)..(19): ribonucleotide modified as described
gggugccuuuuaaacucagtt

SEQ ID NO: 306 - DNA, 21 bp, Artificial Sequence
  Description of Artificial Sequence:  Synthetic
  misc_feature (1)..(20): Phosphorothioate 3'-Internucleotide Linkage
  misc_feature (1)..(19): ribonucleotide modified as described
uuguuguauuuugugguugtt

SEQ ID NO: 307 - DNA, 21 bp, Artificial Sequence
  Description of Artificial Sequence:  Synthetic
  misc_feature (1)..(20): Phosphorothioate 3'-Internucleotide Linkage
  misc_feature (1)..(19): ribonucleotide modified as described
gguuuugauucuuuccaggtt

SEQ ID NO: 308 - DNA, 21 bp, Artificial Sequence
  Description of Artificial Sequence:  Synthetic
  misc_feature (1)..(20): Phosphorothioate 3'-Internucleotide Linkage
  misc_feature (1)..(19): ribonucleotide modified as described
caucagaggcccuccuugctt

SEQ ID NO: 309 - RNA, 43 nt, Artificial Sequence
  Description of Artificial Sequence:  Synthetic
  misc_feature (1)..(43): 2'-O-methyl
ggcauuggccaacguacgcggaauacuucgauucgguuacgaa

SEQ ID NO: 310 - RNA, 21 nt, Artificial Sequence
  Description of Artificial Sequence:  Synthetic
  misc_feature (1)..(21): 2'-O-methyl
cguacgcggaauacuucgauu

SEQ ID NO: 311 - DNA, 21 bp, Artificial Sequence
  Description of Artificial Sequence:  Synthetic
  misc_feature (1)..(14): 2'-O-methyl
  misc_feature (1)..(19): ribonucleotide modified as described
cguacgcggaauacuucgatt

SEQ ID NO: 312 - DNA, 21 bp, Artificial Sequence
  Description of Artificial Sequence:  Synthetic
  misc_feature (1)..(10): 2'-O-methyl
  misc_feature (1)..(19): ribonucleotide modified as described
cguacgcggaauacuucgatt

SEQ ID NO: 313 - DNA, 21 bp, Artificial Sequence
  Description of Artificial Sequence:  Synthetic
  misc_feature (1)..(5): 2'-O-methyl
  misc_feature (1)..(19): ribonucleotide modified as described
cguacgcggaauacuucgatt

SEQ ID NO: 314 - RNA, 21 nt, Artificial Sequence
  Description of Artificial Sequence:  Synthetic
  misc_feature (1)..(21): 2'-O-methyl
ucgaaguauuccgcguacguu

SEQ ID NO: 315 - RNA, 21 nt, Artificial Sequence
  Description of Artificial Sequence:  Synthetic
  misc_feature (1)..(2): 2'-O-methyl
  misc_feature (7)..(7): 2'-O-methyl
  misc_feature (9)..(12): 2'-O-methyl
  misc_feature (14)..(14): 2'-O-methyl
  misc_feature (16)..(16): 2'-O-methyl
  misc_feature (18)..(18): 2'-O-methyl
  misc_feature (20)..(21): 2'-O-methyl
ucgaaguauuccgcguacguu

SEQ ID NO: 316 - DNA, 21 bp, Artificial Sequence
  Description of Artificial Sequence:  Synthetic
  misc_feature (1)..(14): 2'-O-methyl
  misc_feature (1)..(19): ribonucleotide modified as described
ucgaaguauuccgcguacgtt

SEQ ID NO: 317 - DNA, 21 bp, Artificial Sequence
  Description of Artificial Sequence:  Synthetic
  misc_feature (1)..(10): 2'-O-methyl
  misc_feature (1)..(19): ribonucleotide modified as described
ucgaaguauuccgcguacgtt

SEQ ID NO: 318 - DNA, 21 bp, Artificial Sequence
  Description of Artificial Sequence:  Synthetic
  misc_feature (1)..(5): 2'-O-methyl
  misc_feature (1)..(19): ribonucleotide modified as described
ucgaaguauuccgcguacgtt

SEQ ID NO: 319 - DNA, 21 bp, Artificial Sequence
  Description of Artificial Sequence:  Synthetic
  misc_feature (1)..(1): 2'-O-methyl
  misc_feature (3)..(3): 2'-O-methyl
  misc_feature (5)..(5): 2'-O-methyl
  misc_feature (7)..(7): 2'-O-methyl
  misc_feature (12)..(12): 2'-O-methyl
  misc_feature (14)..(17): 2'-O-methyl
  misc_feature (1)..(19): ribonucleotide modified as described
cguacgcggaauacuucgatt

SEQ ID NO: 320 - RNA, 21 nt, Artificial Sequence
  Description of Artificial Sequence:  Synthetic
  misc_feature (1)..(1): 2'-O-methyl
  misc_feature (3)..(3): 2'-O-methyl
  misc_feature (5)..(5): 2'-O-methyl
  misc_feature (7)..(7): 2'-O-methyl
  misc_feature (12)..(12): 2'-O-methyl
  misc_feature (14)..(17): 2'-O-methyl
  misc_feature (20)..(21): 2'-O-methyl
cguacgcggaauacuucgauu

SEQ ID NO: 321 - DNA, 21 bp, Artificial Sequence
  Description of Artificial Sequence:  Synthetic
  misc_feature (20)..(20): Phosphorothioate 3'-Internucleotide Linkage
  misc_feature (1)..(19): ribonucleotide modified as described
cguacgcggaauacuucgatt

SEQ ID NO: 322 - DNA, 21 bp, Artificial Sequence
  Description of Artificial Sequence:  Synthetic
  misc_feature (1)..(2): 2'-O-methyl
  misc_feature (7)..(7): 2'-O-methyl
  misc_feature (9)..(12): 2'-O-methyl
  misc_feature (14)..(14): 2'-O-methyl
  misc_feature (16)..(16): 2'-O-methyl
  misc_feature (18)..(18): 2'-O-methyl
  misc_feature (1)..(19): ribonucleotide modified as described
ucgaaguauuccgcguacgtt

SEQ ID NO: 323 - RNA, 21 nt, Artificial Sequence
  Description of Artificial Sequence:  Synthetic
  misc_feature (20)..(21): n stands for 5-nitroindole universal base
cguacgcggaauacuucgann

SEQ ID NO: 324 - RNA, 21 nt, Artificial Sequence
  Description of Artificial Sequence:  Synthetic
  misc_feature (20)..(21): n stands for 3-nitropyrrole universal base
cguacgcggaauacuucgann

SEQ ID NO: 325 - RNA, 21 nt, Artificial Sequence
  Description of Artificial Sequence:  Synthetic
  misc_feature (20)..(21): n stands for 5-nitroindole universal base
ucgaaguauuccgcguacgnn

SEQ ID NO: 326 - RNA, 21 nt, Artificial Sequence
  Description of Artificial Sequence:  Synthetic
  misc_feature (20)..(21): n stands for 3-nitropyrrole universal base
ucgaaguauuccgcguacgnn

SEQ ID NO: 327 - RNA, 6 nt, Artificial Sequence
  Description of Artificial Sequence:  Synthetic
  misc_feature (1)..(4): Phosphorothioate 3'-Internucleotide Linkage
  misc_feature (1)..(1): 2'-deoxy-2'-fluoro
  misc_feature (3)..(3): 2'-deoxy-2'-fluoro
  misc_feature (5)..(5): 2'-deoxy-2'-fluoro
cguacg

SEQ ID NO: 328 - DNA, 15 bp, Artificial Sequence
  Description of Artificial Sequence:  Synthetic
  misc_feature (1)..(1): 2'-deoxy-2'-fluoro
  misc_feature (6)..(6): 2'-deoxy-2'-fluoro
  misc_feature (8)..(11): 2'-deoxy-2'-fluoro
  misc_feature (11)..(14): Phosphorothioate 3'-Internucleotide Linkage
  misc_feature (1)..(13): ribonucleotide modified as described
cggaauacuucgatt

SEQ ID NO: 329 - DNA, 21 bp, Artificial Sequence
  Description of Artificial Sequence:  Synthetic
  misc_feature (1)..(4): Phosphorothioate 3'-Internucleotide Linkage
  misc_feature (1)..(1): 2'-deoxy-2'-fluoro
  misc_feature (3)..(3): 2'-deoxy-2'-fluoro
  misc_feature (5)..(5): 2'-deoxy-2'-fluoro
  misc_feature (7)..(7): 2'-deoxy-2'-fluoro
  misc_feature (12)..(12): 2'-deoxy-2'-fluoro
  misc_feature (14)..(17): 2'-deoxy-2'-fluoro
  misc_feature (17)..(20): Phosphorothioate 3'-Internucleotide Linkage
  misc_feature (1)..(19): ribonucleotide modified as described
cguacgcggaauacuucgatt

SEQ ID NO: 330 - RNA, 8 nt, Artificial Sequence
  Description of Artificial Sequence:  Synthetic
  misc_feature (1)..(4): Phosphorothioate 3'-Internucleotide Linkage
  misc_feature (1)..(2): 2'-deoxy-2'-fluoro
  misc_feature (7)..(7): 2'-deoxy-2'-fluoro
ucgaagua

SEQ ID NO: 331 - DNA, 13 bp, Artificial Sequence
  Description of Artificial Sequence:  Synthetic
  misc_feature (1)..(4): 2'-deoxy-2'-fluoro
  misc_feature (8)..(8): 2'-deoxy-2'-fluoro
  misc_feature (9)..(12): Phosphorothioate 3'-Internucleotide Linkage
  misc_feature (10)..(10): 2'-deoxy-2'-fluoro
  misc_feature (13)..(13): n is a, c, g, or u
  misc_feature (1)..(11): ribonucleotide modified as described
uuccgcguacgtt

SEQ ID NO: 332 - DNA, 21 bp, Artificial Sequence
  Description of Artificial Sequence:  Synthetic
  misc_feature (1)..(4): Phosphorothioate 3'-Internucleotide Linkage
  misc_feature (1)..(2): 2'-deoxy-2'-fluoro
  misc_feature (7)..(7): 2'-deoxy-2'-fluoro
  misc_feature (9)..(12): 2'-deoxy-2'-fluoro
  misc_feature (16)..(16): 2'-deoxy-2'-fluoro
  misc_feature (17)..(20): Phosphorothioate 3'-Internucleotide Linkage
  misc_feature (18)..(18): 2'-deoxy-2'-fluoro
  misc_feature (1)..(19): ribonucleotide modified as described
ucgaaguauuccgcguacgtt

SEQ ID NO: 333 - RNA, 6 nt, Artificial Sequence
  Description of Artificial Sequence:  Synthetic
  misc_feature (1)..(1): 5'-thiophosphate
  misc_feature (1)..(1): 2'-deoxy-2'-fluoro
  misc_feature (3)..(3): 2'-deoxy-2'-fluoro
  misc_feature (5)..(5): 2'-deoxy-2'-fluoro
cguacg

SEQ ID NO: 334 - DNA, 15 bp, Artificial Sequence
  Description of Artificial Sequence:  Synthetic
  misc_feature (1)..(1): 2'-deoxy-2'-fluoro
  misc_feature (6)..(6): 2'-deoxy-2'-fluoro
  misc_feature (8)..(11): 2'-deoxy-2'-fluoro
  misc_feature (1)..(13): ribonucleotide modified as described
cggaauacuucgatt

SEQ ID NO: 335 - DNA, 21 bp, Artificial Sequence
  Description of Artificial Sequence:  Synthetic
  misc_feature (1)..(1): 5'-thiophosphate
  misc_feature (1)..(1): 2'-deoxy-2'-fluoro
  misc_feature (3)..(3): 2'-deoxy-2'-fluoro
  misc_feature (5)..(5): 2'-deoxy-2'-fluoro
  misc_feature (7)..(7): 2'-deoxy-2'-fluoro
  misc_feature (12)..(12): 2'-deoxy-2'-fluoro
  misc_feature (14)..(17): 2'-deoxy-2'-fluoro
  misc_feature (1)..(19): ribonucleotide modified as described
cguacgcggaauacuucgatt

SEQ ID NO: 336 - RNA, 8 nt, Artificial Sequence
  Description of Artificial Sequence:  Synthetic
  misc_feature (1)..(1): 5'-thiophosphate
  misc_feature (1)..(2): 2'-deoxy-2'-fluoro
  misc_feature (7)..(7): 2'-deoxy-2'-fluoro
ucgaagua

SEQ ID NO: 337 - DNA, 13 bp, Artificial Sequence
  Description of Artificial Sequence:  Synthetic
  misc_feature (1)..(4): 2'-deoxy-2'-fluoro
  misc_feature (8)..(8): 2'-deoxy-2'-fluoro
  misc_feature (10)..(10): 2'-deoxy-2'-fluoro
  misc_feature (1)..(11): ribonucleotide modified as described
uuccgcguacgtt

SEQ ID NO: 338 - DNA, 21 bp, Artificial Sequence
  Description of Artificial Sequence:  Synthetic
  misc_feature (1)..(1): 5'-thiophosphate
  misc_feature (1)..(2): 2'-deoxy-2'-fluoro
  misc_feature (7)..(7): 2'-deoxy-2'-fluoro
  misc_feature (9)..(12): 2'-deoxy-2'-fluoro
  misc_feature (16)..(16): 2'-deoxy-2'-fluoro
  misc_feature (18)..(18): 2'-deoxy-2'-fluoro
  misc_feature (1)..(19): ribonucleotide modified as described
ucgaaguauuccgcguacgtt

SEQ ID NO: 339 - DNA, 21 bp, Artificial Sequence
  Description of Artificial Sequence:  Synthetic
  misc_feature (1)..(4): Phosphorothioate 3'-Internucleotide Linkage
  misc_feature (3)..(6): 2'-deoxy-2'-fluoro
  misc_feature (8)..(8): 2'-deoxy-2'-fluoro
  misc_feature (13)..(13): 2'-deoxy-2'-fluoro
  misc_feature (15)..(15): 2'-deoxy-2'-fluoro
  misc_feature (17)..(17): 2'-deoxy-2'-fluoro
  misc_feature (17)..(20): Phosphorothioate 3'-Internucleotide Linkage
  misc_feature (19)..(19): 2'-deoxy-2'-fluoro
  misc_feature (1)..(19): ribonucleotide modified as described
agcuucauaaggcgcaugctt

SEQ ID NO: 340 - DNA, 21 bp, Artificial Sequence
  Description of Artificial Sequence:  Synthetic
  misc_feature (1)..(4): Phosphorothioate 3'-Internucleotide Linkage
  misc_feature (2)..(2): 2'-deoxy-2'-fluoro
  misc_feature (4)..(4): 2'-deoxy-2'-fluoro
  misc_feature (6)..(6): 2'-deoxy-2'-fluoro
  misc_feature (8)..(11): 2'-deoxy-2'-fluoro
  misc_feature (13)..(13): 2'-deoxy-2'-fluoro
  misc_feature (17)..(20): Phosphorothioate 3'-Internucleotide Linkage
  misc_feature (18)..(19): 2'-deoxy-2'-fluoro
  misc_feature (1)..(19): ribonucleotide modified as described
gcaugcgccuuaugaagcutt

SEQ ID NO: 341 - DNA, 21 bp, Artificial Sequence
  Description of Artificial Sequence:  Synthetic
  misc_feature (1)..(1): 5'-thiophosphate
  misc_feature (3)..(6): 2'-deoxy-2'-fluoro
  misc_feature (8)..(8): 2'-deoxy-2'-fluoro
  misc_feature (13)..(13): 2'-deoxy-2'-fluoro
  misc_feature (15)..(15): 2'-deoxy-2'-fluoro
  misc_feature (17)..(17): 2'-deoxy-2'-fluoro
  misc_feature (19)..(19): 2'-deoxy-2'-fluoro
  misc_feature (1)..(19): ribonucleotide modified as described
agcuucauaaggcgcaugctt

SEQ ID NO: 342 - DNA, 21 bp, Artificial Sequence
  Description of Artificial Sequence:  Synthetic
  misc_feature (1)..(1): 5'-thiophosphate
  misc_feature (2)..(2): 2'-O-methyl
  misc_feature (4)..(4): 2'-O-methyl
  misc_feature (6)..(6): 2'-O-methyl
  misc_feature (8)..(11): 2'-O-methyl
  misc_feature (13)..(13): 2'-O-methyl
  misc_feature (18)..(19): 2'-O-methyl
  misc_feature (1)..(19): ribonucleotide modified as described
gcaugcgccuuaugaagcutt

SEQ ID NO: 343 - DNA, 21 bp, Artificial Sequence
  Description of Artificial Sequence:  Synthetic
  misc_feature (1)..(1): 2'-O-methyl
  misc_feature (3)..(3): 2'-O-methyl
  misc_feature (5)..(5): 2'-O-methyl
  misc_feature (7)..(7): 2'-O-methyl
  misc_feature (12)..(12): 2'-O-methyl
  misc_feature (14)..(17): 2'-O-methyl
  misc_feature (1)..(19): ribonucleotide modified as described
cguacgcggaauacuucgatt

SEQ ID NO: 344 - DNA, 21 bp, Artificial Sequence
  Description of Artificial Sequence:  Synthetic
  misc_feature (1)..(2): 2'-O-methyl
  misc_feature (7)..(7): 2'-O-methyl
  misc_feature (9)..(12): 2'-O-methyl
  misc_feature (14)..(14): 2'-O-methyl
  misc_feature (16)..(16): 2'-O-methyl
  misc_feature (18)..(18): 2'-O-methyl
  misc_feature (1)..(19): ribonucleotide modified as described
ucgaaguauuccgcguacgtt

SEQ ID NO: 345 - DNA, 21 bp, Artificial Sequence
  Description of Artificial Sequence:  Synthetic
  misc_feature (1)..(2): 2'-O-methyl
  misc_feature (1)..(4): Phosphorothioate 3'-Internucleotide Linkage
  misc_feature (6)..(8): 2'-O-methyl
  misc_feature (15)..(15): 2'-O-methyl
  misc_feature (17)..(19): 2'-O-methyl
  misc_feature (17)..(20): Phosphorothioate 3'-Internucleotide Linkage
  misc_feature (1)..(19): ribonucleotide modified as described
cugaguuuaaaaggcaccctt

SEQ ID NO: 346 - DNA, 21 bp, Artificial Sequence
  Description of Artificial Sequence:  Synthetic
  misc_feature (1)..(1): 2'-O-methyl
  misc_feature (1)..(4): Phosphorothioate 3'-Internucleotide Linkage
  misc_feature (4)..(5): 2'-O-methyl
  misc_feature (7)..(7): 2'-O-methyl
  misc_feature (12)..(12): 2'-O-methyl
  misc_feature (14)..(14): 2'-O-methyl
  misc_feature (17)..(17): 2'-O-methyl
  misc_feature (17)..(20): Phosphorothioate 3'-Internucleotide Linkage
  misc_feature (1)..(19): ribonucleotide modified as described
caaccacaaaauacaacaatt

SEQ ID NO: 347 - DNA, 21 bp, Artificial Sequence
  Description of Artificial Sequence:  Synthetic
  misc_feature (1)..(3): 2'-O-methyl
  misc_feature (1)..(4): Phosphorothioate 3'-Internucleotide Linkage
  misc_feature (12)..(13): 2'-O-methyl
  misc_feature (17)..(20): Phosphorothioate 3'-Internucleotide Linkage
  misc_feature (18)..(19): 2'-O-methyl
  misc_feature (1)..(19): ribonucleotide modified as described
ccuggaaagaaucaaaacctt

SEQ ID NO: 348 - DNA, 21 bp, Artificial Sequence
  Description of Artificial Sequence:  Synthetic
  misc_feature (1)..(4): Phosphorothioate 3'-Internucleotide Linkage
  misc_feature (2)..(2): 2'-O-methyl
  misc_feature (11)..(15): 2'-O-methyl
  misc_feature (17)..(20): Phosphorothioate 3'-Internucleotide Linkage
  misc_feature (18)..(18): 2'-O-methyl
  misc_feature (1)..(19): ribonucleotide modified as described
gcaaggagggccucugaugtt

SEQ ID NO: 349 - DNA, 21 bp, Artificial Sequence
  Description of Artificial Sequence:  Synthetic
  misc_feature (1)..(1): 2'-deoxy-2'-amino
  misc_feature (3)..(3): 2'-deoxy-2'-amino
  misc_feature (5)..(5): 2'-deoxy-2'-amino
  misc_feature (7)..(7): 2'-deoxy-2'-amino
  misc_feature (12)..(12): 2'-deoxy-2'-amino
  misc_feature (14)..(17): 2'-deoxy-2'-amino
  misc_feature (1)..(19): ribonucleotide modified as described
cguacgcggaauacuucgatt

SEQ ID NO: 350 - DNA, 21 bp, Artificial Sequence
  Description of Artificial Sequence:  Synthetic
  misc_feature (1)..(2): 2'-deoxy-2'-amino
  misc_feature (7)..(7): 2'-deoxy-2'-amino
  misc_feature (9)..(12): 2'-deoxy-2'-amino
  misc_feature (14)..(14): 2'-deoxy-2'-amino
  misc_feature (16)..(16): 2'-deoxy-2'-amino
  misc_feature (18)..(18): 2'-deoxy-2'-amino
  misc_feature (1)..(19): ribonucleotide modified as described
ucgaaguauuccgcguacgtt

SEQ ID NO: 351 - DNA, 21 bp, Artificial Sequence
  Description of Artificial Sequence:  Synthetic
  misc_feature (1)..(1): 2'-deoxy-2'-amino
  misc_feature (3)..(3): 2'-deoxy-2'-amino
  misc_feature (5)..(5): 2'-deoxy-2'-amino
  misc_feature (7)..(7): 2'-deoxy-2'-amino
  misc_feature (12)..(12): 2'-deoxy-2'-amino
  misc_feature (14)..(17): 2'-deoxy-2'-amino
  misc_feature (20)..(20): 2'-deoxy-2'-amino
  misc_feature (1)..(20): ribonucleotide modified as described
cguacgcggaauacuucgaut

SEQ ID NO: 352 - DNA, 21 bp, Artificial Sequence
  Description of Artificial Sequence:  Synthetic
  misc_feature (1)..(2): 2'-deoxy-2'-amino
  misc_feature (7)..(7): 2'-deoxy-2'-amino
  misc_feature (9)..(12): 2'-deoxy-2'-amino
  misc_feature (14)..(14): 2'-deoxy-2'-amino
  misc_feature (16)..(16): 2'-deoxy-2'-amino
  misc_feature (18)..(18): 2'-deoxy-2'-amino
  misc_feature (20)..(20): 2'-deoxy-2'-amino
  misc_feature (1)..(20): ribonucleotide modified as described
ucgaaguauuccgcguacgut

SEQ ID NO: 353 - DNA, 21 bp, Artificial Sequence
  Description of Artificial Sequence:  Synthetic
  misc_feature (1)..(1): 5'-3 attached terminal deoxyabasic moiety
  misc_feature (1)..(5): Phosphorothioate 3'-Internucleotide Linkage
  misc_feature (20)..(21): n stands for 5-nitroindole universal base
  misc_feature (21)..(21): 3'-3 attached terminal deoxyabasic moiety
ccccgggaggucucguagann

SEQ ID NO: 354 - DNA, 21 bp, Artificial Sequence
  Description of Artificial Sequence:  Synthetic
  misc_feature (1)..(1): 5'-3 attached terminal deoxyabasic moiety
  misc_feature (1)..(5): Phosphorothioate 3'-Internucleotide Linkage
  misc_feature (20)..(21): n stands for 5-nitroindole universal base
  misc_feature (21)..(21): 3'-3 attached terminal deoxyabasic moiety
agaugcucuggagggccccnn

SEQ ID NO: 355 - DNA, 21 bp, Artificial Sequence
  Description of Artificial Sequence:  Synthetic
  misc_feature (1)..(5): Phosphorothioate 3'-Internucleotide Linkage
  misc_feature (20)..(21): n stands for 5-nitroindole universal base
  misc_feature (21)..(21): 3'-3 attached terminal deoxyabasic moiety
ucuacgagaccucccggggnn

SEQ ID NO: 356 - DNA, 21 bp, Artificial Sequence
  Description of Artificial Sequence:  Synthetic
  misc_feature (1)..(5): Phosphorothioate 3'-Internucleotide Linkage
  misc_feature (20)..(21): n stands for 5-nitroindole universal base
  misc_feature (21)..(21): 3'-3 attached terminal deoxyabasic moiety
ggggcccuccagagcaucunn

SEQ ID NO: 357 - DNA, 21 bp, Artificial Sequence
  Description of Artificial Sequence:  Synthetic
  misc_feature (1)..(1): 5'-3 attached terminal deoxyabasic moiety
  misc_feature (1)..(4): Phosphorothioate 3'-Internucleotide Linkage
  misc_feature (11)..(14): Phosphorothioate 3'-Internucleotide Linkage
  misc_feature (16)..(16): Phosphorothioate 3'-Internucleotide Linkage
  misc_feature (20)..(21): n stands for 5-nitroindole universal base
  misc_feature (21)..(21): 3'-3 attached terminal deoxyabasic moiety
ccccgggaggucucguagann

SEQ ID NO: 358 - DNA, 21 bp, Artificial Sequence
  Description of Artificial Sequence:  Synthetic
  misc_feature (1)..(1): 5'-3 attached terminal deoxyabasic moiety
  misc_feature (4)..(4): Phosphorothioate 3'-Internucleotide Linkage
  misc_feature (6)..(9): Phosphorothioate 3'-Internucleotide Linkage
  misc_feature (16)..(19): Phosphorothioate 3'-Internucleotide Linkage
  misc_feature (20)..(21): n stands for 5-nitroindole universal base
  misc_feature (21)..(21): 3'-3 attached terminal deoxyabasic moiety
agaugcucuggagggccccnn

SEQ ID NO: 359 - DNA, 21 bp, Artificial Sequence
  Description of Artificial Sequence:  Synthetic
  misc_feature (1)..(3): Phosphorothioate 3'-Internucleotide Linkage
  misc_feature (5)..(5): Phosphorothioate 3'-Internucleotide Linkage
  misc_feature (10)..(15): Phosphorothioate 3'-Internucleotide Linkage
  misc_feature (20)..(21): n stands for 5-nitroindole universal base
  misc_feature (21)..(21): 3'-3 attached terminal deoxyabasic moiety
ucuacgagaccucccggggnn

SEQ ID NO: 360 - DNA, 21 bp, Artificial Sequence
  Description of Artificial Sequence:  Synthetic
  misc_feature (5)..(10): Phosphorothioate 3'-Internucleotide Linkage
  misc_feature (15)..(15): Phosphorothioate 3'-Internucleotide Linkage
  misc_feature (17)..(19): Phosphorothioate 3'-Internucleotide Linkage
  misc_feature (20)..(21): n stands for 5-nitroindole universal base
  misc_feature (21)..(21): 3'-3 attached terminal deoxyabasic moiety
ggggcccuccagagcaucunn

SEQ ID NO: 361 - DNA, 21 bp, Artificial Sequence
  Description of Artificial Sequence:  Synthetic
  misc_feature (1)..(4): 2'-O-methyl
  misc_feature (1)..(1): 5'-3 attached terminal deoxyabasic moiety
  misc_feature (1)..(4): Phosphorothioate 3'-Internucleotide Linkage
  misc_feature (11)..(14): 2'-O-methyl
  misc_feature (16)..(16): 2'-O-methyl
  misc_feature (17)..(19): Phosphorothioate 3'-Internucleotide Linkage
  misc_feature (20)..(21): n stands for 5-nitroindole universal base
  misc_feature (21)..(21): 3'-3 attached terminal deoxyabasic moiety
ccccgggaggucucguagann

SEQ ID NO: 362 - DNA, 21 bp, Artificial Sequence
  Description of Artificial Sequence:  Synthetic
  misc_feature (1)..(1): 5'-3 attached terminal deoxyabasic moiety
  misc_feature (1)..(4): Phosphorothioate 3'-Internucleotide Linkage
  misc_feature (4)..(4): 2'-O-methyl
  misc_feature (6)..(9): 2'-O-methyl
  misc_feature (16)..(19): 2'-O-methyl
  misc_feature (17)..(19): Phosphorothioate 3'-Internucleotide Linkage
  misc_feature (20)..(21): n stands for 5-nitroindole universal base
  misc_feature (21)..(21): 3'-3 attached terminal deoxyabasic moiety
agaugcucuggagggccccnn

SEQ ID NO: 363 - DNA, 21 bp, Artificial Sequence
  Description of Artificial Sequence:  Synthetic
  misc_feature (1)..(4): 2'-deoxy-2'-fluoro
  misc_feature (1)..(1): 5'-3 attached terminal deoxyabasic moiety
  misc_feature (11)..(14): 2'-deoxy-2'-fluoro
  misc_feature (16)..(16): 2'-deoxy-2'-fluoro
  misc_feature (20)..(21): n stands for 5-nitroindole universal base
  misc_feature (21)..(21): 3'-3 attached terminal deoxyabasic moiety
ccccgggaggucucguagann

SEQ ID NO: 364 - DNA, 21 bp, Artificial Sequence
  Description of Artificial Sequence:  Synthetic
  misc_feature (1)..(1): 5'-3 attached terminal deoxyabasic moiety
  misc_feature (4)..(4): 2'-deoxy-2'-fluoro
  misc_feature (6)..(9): 2'-deoxy-2'-fluoro
  misc_feature (16)..(19): 2'-deoxy-2'-fluoro
  misc_feature (20)..(21): n stands for 5-nitroindole universal base
  misc_feature (21)..(21): 3'-3 attached terminal deoxyabasic moiety
agaugcucuggagggccccnn

SEQ ID NO: 365 - DNA, 21 bp, Artificial Sequence
  Description of Artificial Sequence:  Synthetic
  misc_feature (1)..(1): 5'-3 attached terminal deoxyabasic moiety
  misc_feature (1)..(3): Phosphorothioate 3'-Internucleotide Linkage
  misc_feature (5)..(5): Phosphorothioate 3'-Internucleotide Linkage
  misc_feature (10)..(15): Phosphorothioate 3'-Internucleotide Linkage
  misc_feature (20)..(21): n stands for 5-nitroindole universal base
  misc_feature (21)..(21): 3'-3 attached terminal deoxyabasic moiety
ucuacgagaccucccggggnn

SEQ ID NO: 366 - RNA, 19 nt, Artificial Sequence
  Description of Artificial Sequence:  Synthetic
  misc_feature (1)..(3): 2'-deoxy-2'-fluoro
  misc_feature (5)..(5): 2'-deoxy-2'-fluoro
  misc_feature (10)..(15): 2'-deoxy-2'-fluoro
ucuacgagaccucccgggg

SEQ ID NO: 367 - RNA, 19 nt, Artificial Sequence
  Description of Artificial Sequence:  Synthetic
  misc_feature (5)..(10): 2'-deoxy-2'-fluoro
  misc_feature (15)..(15): 2'-deoxy-2'-fluoro
  misc_feature (17)..(19): 2'-deoxy-2'-fluoro
ggggcccuccagagcaucu

SEQ ID NO: 368 - RNA, 21 nt, Artificial Sequence
  Description of Artificial Sequence:  Synthetic
  misc_feature (1)..(3): 2'-deoxy-2'-fluoro
  misc_feature (5)..(5): 2'-deoxy-2'-fluoro
  misc_feature (10)..(15): 2'-deoxy-2'-fluoro
  misc_feature (20)..(21): n stands for 5-nitroindole universal base
ucuacgagaccucccggggnn

SEQ ID NO: 369 - RNA, 21 nt, Artificial Sequence
  Description of Artificial Sequence:  Synthetic
  misc_feature (5)..(10): 2'-deoxy-2'-fluoro
  misc_feature (15)..(15): 2'-deoxy-2'-fluoro
  misc_feature (17)..(19): 2'-deoxy-2'-fluoro
  misc_feature (20)..(21): n stands for 5-nitroindole universal base
ggggcccuccagagcaucunn

SEQ ID NO: 370 - RNA, 21 nt, Artificial Sequence
  Description of Artificial Sequence:  Synthetic
  misc_feature (1)..(3): 2'-deoxy-2'-fluoro
  misc_feature (1)..(1): 5'-3 attached terminal deoxyabasic moiety
  misc_feature (5)..(5): 2'-deoxy-2'-fluoro
  misc_feature (10)..(15): 2'-deoxy-2'-fluoro
  misc_feature (20)..(21): n stands for 5-nitroindole universal base
  misc_feature (21)..(21): 3'-3 attached terminal deoxyabasic moiety
ucuacgagaccucccggggnn

SEQ ID NO: 371 - RNA, 21 nt, Artificial Sequence
  Description of Artificial Sequence:  Synthetic
  misc_feature (1)..(4): Phosphorothioate 3'-Internucleotide Linkage
  misc_feature (11)..(14): Phosphorothioate 3'-Internucleotide Linkage
  misc_feature (16)..(16): Phosphorothioate 3'-Internucleotide Linkage
  misc_feature (20)..(21): n stands for 5-nitroindole universal base
  misc_feature (21)..(21): 3'-3 attached terminal deoxyabasic moiety
ccccgggaggucucguagann

SEQ ID NO: 372 - DNA, 21 bp, Artificial Sequence
  Description of Artificial Sequence:  Synthetic
  misc_feature (1)..(1): 2'-deoxy-2'-fluoro
  misc_feature (1)..(1): 5'-3 attached terminal deoxyabasic moiety
  misc_feature (3)..(3): 2'-deoxy-2'-fluoro
  misc_feature (5)..(5): 2'-deoxy-2'-fluoro
  misc_feature (7)..(7): 2'-deoxy-2'-fluoro
  misc_feature (12)..(12): 2'-deoxy-2'-fluoro
  misc_feature (14)..(17): 2'-deoxy-2'-fluoro
  misc_feature (1)..(19): ribonucleotide modified as described
  misc_feature (21)..(21): 3'-3 attached terminal deoxyabasic moiety
cguacgcggaauacuucgatt

SEQ ID NO: 373 - DNA, 21 bp, Artificial Sequence
  Description of Artificial Sequence:  Synthetic
  misc_feature (1)..(1): 2'-O-methyl
  misc_feature (1)..(1): 5'-3 attached terminal deoxyabasic moiety
  misc_feature (3)..(3): 2'-O-methyl
  misc_feature (5)..(5): 2'-O-methyl
  misc_feature (7)..(7): 2'-O-methyl
  misc_feature (12)..(12): 2'-O-methyl
  misc_feature (14)..(17): 2'-O-methyl
  misc_feature (1)..(19): ribonucleotide modified as described
  misc_feature (21)..(21): 3'-3 attached terminal deoxyabasic moiety
cguacgcggaauacuucgatt

SEQ ID NO: 374 - DNA, 21 bp, Artificial Sequence
  Description of Artificial Sequence:  Synthetic
  misc_feature (1)..(2): 2'-deoxy-2'-fluoro
  misc_feature (7)..(7): 2'-deoxy-2'-fluoro
  misc_feature (9)..(12): 2'-deoxy-2'-fluoro
  misc_feature (14)..(14): 2'-deoxy-2'-fluoro
  misc_feature (16)..(16): 2'-deoxy-2'-fluoro
  misc_feature (18)..(18): 2'-deoxy-2'-fluoro
  misc_feature (1)..(19): ribonucleotide modified as described
  misc_feature (20)..(20): Phosphorothioate 3'-Internucleotide Linkage
ucgaaguauuccgcguacgtt

SEQ ID NO: 375 - DNA, 21 bp, Artificial Sequence
  Description of Artificial Sequence:  Synthetic
  misc_feature (1)..(2): 2'-deoxy-2'-fluoro
  misc_feature (3)..(6): 2'-O-methyl
  misc_feature (7)..(7): 2'-deoxy-2'-fluoro
  misc_feature (8)..(8): 2'-O-methyl
  misc_feature (9)..(12): 2'-deoxy-2'-fluoro
  misc_feature (13)..(13): 2'-O-methyl
  misc_feature (14)..(14): 2'-deoxy-2'-fluoro
  misc_feature (15)..(15): 2'-O-methyl
  misc_feature (16)..(16): 2'-deoxy-2'-fluoro
  misc_feature (17)..(17): 2'-O-methyl
  misc_feature (18)..(18): 2'-deoxy-2'-fluoro
  misc_feature (19)..(19): 2'-O-methyl
  misc_feature (1)..(19): ribonucleotide modified as described
  misc_feature (20)..(20): Phosphorothioate 3'-Internucleotide Linkage
ucgaaguauuccgcguacgtt

SEQ ID NO: 376 - DNA, 21 bp, Artificial Sequence
  Description of Artificial Sequence:  Synthetic
  misc_feature (1)..(1): 2'-deoxy-2'-fluoro
  misc_feature (1)..(1): 5'-3 attached terminal deoxyabasic moiety
  misc_feature (2)..(2): 2'-O-methyl
  misc_feature (3)..(3): 2'-deoxy-2'-fluoro
  misc_feature (4)..(4): 2'-O-methyl
  misc_feature (5)..(5): 2'-deoxy-2'-fluoro
  misc_feature (6)..(6): 2'-O-methyl
  misc_feature (7)..(7): 2'-deoxy-2'-fluoro
  misc_feature (8)..(11): 2'-O-methyl
  misc_feature (12)..(12): 2'-deoxy-2'-fluoro
  misc_feature (13)..(13): 2'-O-methyl
  misc_feature (14)..(17): 2'-deoxy-2'-fluoro
  misc_feature (18)..(19): 2'-O-methyl
  misc_feature (1)..(19): ribonucleotide modified as described
  misc_feature (21)..(21): 3'-3 attached terminal deoxyabasic moiety
cguacgcggaauacuucgatt

SEQ ID NO: 377 - DNA, 21 bp, Artificial Sequence
  Description of Artificial Sequence:  Synthetic
  misc_feature (1)..(1): 2'-deoxy-2'-fluoro
  misc_feature (1)..(1): 5'-3 attached terminal deoxyabasic moiety
  misc_feature (2)..(2): 2'-deoxy
  misc_feature (3)..(3): 2'-deoxy-2'-fluoro
  misc_feature (4)..(4): 2'-deoxy
  misc_feature (5)..(5): 2'-deoxy-2'-fluoro
  misc_feature (6)..(6): 2'-deoxy
  misc_feature (7)..(7): 2'-deoxy-2'-fluoro
  misc_feature (8)..(11): 2'-deoxy
  misc_feature (12)..(12): 2'-deoxy-2'-fluoro
  misc_feature (13)..(13): 2'-deoxy
  misc_feature (14)..(17): 2'-deoxy-2'-fluoro
  misc_feature (18)..(19): 2'-deoxy
  misc_feature (1)..(19): ribonucleotide modified as described
  misc_feature (21)..(21): 3'-3 attached terminal deoxyabasic moiety
cguacgcggaauacuucgatt

SEQ ID NO: 378 - DNA, 21 bp, Artificial Sequence
  Description of Artificial Sequence:  Synthetic
  misc_feature (1)..(2): 2'-deoxy-2'-fluoro
  misc_feature (7)..(7): 2'-deoxy-2'-fluoro
  misc_feature (9)..(12): 2'-deoxy-2'-fluoro
  misc_feature (14)..(14): 2'-deoxy-2'-fluoro
  misc_feature (16)..(16): 2'-deoxy-2'-fluoro
  misc_feature (18)..(18): 2'-deoxy-2'-fluoro
  misc_feature (1)..(19): ribonucleotide modified as described
  misc_feature (20)..(20): Phosphorothioate 3'-Internucleotide Linkage
  misc_feature (21)..(21): n stands for 3'-deoxythymidine
ucgaaguauuccgcguacgtt

SEQ ID NO: 379 - DNA, 20 bp, Artificial Sequence
  Description of Artificial Sequence:  Synthetic
  misc_feature (1)..(2): 2'-deoxy-2'-fluoro
  misc_feature (7)..(7): 2'-deoxy-2'-fluoro
  misc_feature (9)..(12): 2'-deoxy-2'-fluoro
  misc_feature (14)..(14): 2'-deoxy-2'-fluoro
  misc_feature (16)..(16): 2'-deoxy-2'-fluoro
  misc_feature (18)..(18): 2'-deoxy-2'-fluoro
  misc_feature (1)..(19): ribonucleotide modified as described
  misc_feature (20)..(20): 3'-3 attached terminal glyceryl moiety
ucgaaguauuccgcguacgt

SEQ ID NO: 380 - DNA, 21 bp, Artificial Sequence
  Description of Artificial Sequence:  Synthetic
  misc_feature (1)..(2): 2'-deoxy-2'-fluoro
  misc_feature (7)..(7): 2'-deoxy-2'-fluoro
  misc_feature (9)..(12): 2'-deoxy-2'-fluoro
  misc_feature (14)..(14): 2'-deoxy-2'-fluoro
  misc_feature (16)..(16): 2'-deoxy-2'-fluoro
  misc_feature (18)..(18): 2'-deoxy-2'-fluoro
  misc_feature (1)..(19): ribonucleotide modified as described
  misc_feature (21)..(21): 3'-3 attached terminal glyceryl moiety
ucgaaguauuccgcguacgtt

SEQ ID NO: 381 - DNA, 21 bp, Artificial Sequence
  Description of Artificial Sequence:  Synthetic
  misc_feature (1)..(1): 5'-3 attached terminal deoxyabasic moiety
  misc_feature (3)..(6): 2'-O-methyl
  misc_feature (8)..(8): 2'-O-methyl
  misc_feature (13)..(13): 2'-O-methyl
  misc_feature (15)..(15): 2'-O-methyl
  misc_feature (17)..(17): 2'-O-methyl
  misc_feature (19)..(19): 2'-O-methyl
  misc_feature (1)..(19): ribonucleotide modified as described
  misc_feature (21)..(21): 3'-3 attached terminal deoxyabasic moiety
agcuucauaaggcgcaugctt

SEQ ID NO: 382 - DNA, 21 bp, Artificial Sequence
  Description of Artificial Sequence:  Synthetic
  misc_feature (1)..(1): 5'-3 attached terminal deoxyabasic moiety
  misc_feature (3)..(6): 2'-deoxy-2'-fluoro
  misc_feature (8)..(8): 2'-deoxy-2'-fluoro
  misc_feature (13)..(13): 2'-deoxy-2'-fluoro
  misc_feature (15)..(15): 2'-deoxy-2'-fluoro
  misc_feature (17)..(17): 2'-deoxy-2'-fluoro
  misc_feature (19)..(19): 2'-deoxy-2'-fluoro
  misc_feature (1)..(19): ribonucleotide modified as described
  misc_feature (21)..(21): 3'-3 attached terminal deoxyabasic moiety
agcuucauaaggcgcaugctt

SEQ ID NO: 383 - DNA, 21 bp, Artificial Sequence
  Description of Artificial Sequence:  Synthetic
  misc_feature (2)..(2): 2'-deoxy-2'-fluoro
  misc_feature (4)..(4): 2'-deoxy-2'-fluoro
  misc_feature (6)..(6): 2'-deoxy-2'-fluoro
  misc_feature (8)..(11): 2'-deoxy-2'-fluoro
  misc_feature (13)..(13): 2'-deoxy-2'-fluoro
  misc_feature (18)..(19): 2'-deoxy-2'-fluoro
  misc_feature (1)..(19): ribonucleotide modified as described
  misc_feature (20)..(20): Phosphorothioate 3'-Internucleotide Linkage
gcaugcgccuuaugaagcutt

SEQ ID NO: 384 - DNA, 21 bp, Artificial Sequence
  Description of Artificial Sequence:  Synthetic
  misc_feature (1)..(7): 2'-O-methyl
  misc_feature (1)..(1): 5'-3 attached terminal deoxyabasic moiety
  misc_feature (12)..(12): 2'-O-methyl
  misc_feature (14)..(19): 2'-O-methyl
  misc_feature (1)..(19): ribonucleotide modified as described
  misc_feature (21)..(21): 3'-3 attached terminal deoxyabasic moiety
cguacgcggaauacuucgatt

SEQ ID NO: 385 - DNA, 21 bp, Artificial Sequence
  Description of Artificial Sequence:  Synthetic
  misc_feature (1)..(1): 2'-O-methyl
  misc_feature (1)..(1): 5'-3 attached terminal deoxyabasic moiety
  misc_feature (3)..(3): 2'-O-methyl
  misc_feature (5)..(5): 2'-O-methyl
  misc_feature (7)..(7): 2'-O-methyl
  misc_feature (12)..(12): 2'-O-methyl
  misc_feature (14)..(17): 2'-O-methyl
  misc_feature (1)..(19): ribonucleotide modified as described
  misc_feature (21)..(21): 3'-3 attached terminal deoxyabasic moiety
cguacgcggaauacuucgatt

SEQ ID NO: 386 - DNA, 21 bp, Artificial Sequence
  Description of Artificial Sequence:  Synthetic
  misc_feature (1)..(2): 2'-O-methyl
  misc_feature (7)..(7): 2'-O-methyl
  misc_feature (9)..(12): 2'-O-methyl
  misc_feature (14)..(14): 2'-O-methyl
  misc_feature (16)..(16): 2'-O-methyl
  misc_feature (18)..(18): 2'-O-methyl
  misc_feature (20)..(20): 3'-deoxy thymidine
  misc_feature (1)..(19): ribonucleotide modified as described
ucgaaguauuccgcguacgtt

SEQ ID NO: 387 - DNA, 21 bp, Artificial Sequence
  Description of Artificial Sequence:  Synthetic
  misc_feature (1)..(2): 2'-O-methyl
  misc_feature (7)..(7): 2'-O-methyl
  misc_feature (9)..(12): 2'-O-methyl
  misc_feature (14)..(14): 2'-O-methyl
  misc_feature (16)..(16): 2'-O-methyl
  misc_feature (18)..(18): 2'-O-methyl
  misc_feature (1)..(19): ribonucleotide modified as described
  misc_feature (21)..(21): dideoxy cytidine
ucgaaguauuccgcguacgtc

SEQ ID NO: 388 - DNA, 20 bp, Artificial Sequence
  Description of Artificial Sequence:  Synthetic
  misc_feature (1)..(2): 2'-O-methyl
  misc_feature (7)..(7): 2'-O-methyl
  misc_feature (9)..(12): 2'-O-methyl
  misc_feature (14)..(14): 2'-O-methyl
  misc_feature (16)..(16): 2'-O-methyl
  misc_feature (18)..(18): 2'-O-methyl
  misc_feature (1)..(19): ribonucleotide modified as described
  misc_feature (20)..(20): inverted thymidine
ucgaaguauuccgcguacgt

SEQ ID NO: 389 - DNA, 21 bp, Artificial Sequence
  Description of Artificial Sequence:  Synthetic
  misc_feature (1)..(2): 2'-O-methyl
  misc_feature (7)..(7): 2'-O-methyl
  misc_feature (9)..(12): 2'-O-methyl
  misc_feature (14)..(14): 2'-O-methyl
  misc_feature (16)..(16): 2'-O-methyl
  misc_feature (18)..(18): 2'-O-methyl
  misc_feature (1)..(19): ribonucleotide modified as described
  misc_feature (21)..(21): inverted thymidine
ucgaaguauuccgcguacgtt

SEQ ID NO: 390 - DNA, 21 bp, Artificial Sequence
  Description of Artificial Sequence:  Synthetic
  misc_feature (1)..(1): 2'-deoxy-2'-fluoro
  misc_feature (1)..(1): 5'-3 attached terminal deoxyabasic moiety
  misc_feature (4)..(5): 2'-deoxy-2'-fluoro
  misc_feature (7)..(7): 2'-deoxy-2'-fluoro
  misc_feature (12)..(12): 2'-deoxy-2'-fluoro
  misc_feature (14)..(14): 2'-deoxy-2'-fluoro
  misc_feature (17)..(17): 2'-deoxy-2'-fluoro
  misc_feature (1)..(19): ribonucleotide modified as described
  misc_feature (21)..(21): 3'-3 attached terminal deoxyabasic moiety
caaccacaaaauacaacaatt

SEQ ID NO: 391 - DNA, 21 bp, Artificial Sequence
  Description of Artificial Sequence:  Synthetic
  misc_feature (1)..(2): 2'-deoxy-2'-fluoro
  misc_feature (4)..(5): 2'-deoxy-2'-fluoro
  misc_feature (7)..(7): 2'-deoxy-2'-fluoro
  misc_feature (9)..(12): 2'-deoxy-2'-fluoro
  misc_feature (14)..(14): 2'-deoxy-2'-fluoro
  misc_feature (17)..(18): 2'-deoxy-2'-fluoro
  misc_feature (1)..(19): ribonucleotide modified as described
  misc_feature (20)..(20): Phosphorothioate 3'-Internucleotide Linkage
uuguuguauuuugugguugtt

SEQ ID NO: 392 - RNA, 21 nt, Artificial Sequence
  Description of Artificial Sequence:  Synthetic
  misc_feature (1)..(1): 5'-3 attached terminal deoxyabasic moiety
  misc_feature (1)..(1): 2'-deoxy-2'-fluoro
  misc_feature (5)..(12): 2'-deoxy-2'-fluoro
  misc_feature (15)..(20): 2'-deoxy-2'-fluoro
  misc_feature (21)..(21): 3'-3 attached terminal deoxyabasic moiety
uggacuucucucaauuuucua

SEQ ID NO: 393 - DNA, 21 bp, Artificial Sequence
  Description of Artificial Sequence:  Synthetic
  misc_feature (6)..(7): 2'-deoxy-2'-fluoro
  misc_feature (16)..(18): 2'-deoxy-2'-fluoro
  misc_feature (1)..(19): ribonucleotide modified as described
  misc_feature (20)..(20): Phosphorothioate 3'-Internucleotide Linkage
gaaaauugagagaaguccatt

SEQ ID NO: 394 - RNA, 21 nt, Artificial Sequence
  Description of Artificial Sequence:  Synthetic
  misc_feature (1)..(1): 5'-3 attached terminal deoxyabasic moiety
  misc_feature (2)..(7): 2'-deoxy-2'-fluoro
  misc_feature (10)..(17): 2'-deoxy-2'-fluoro
  misc_feature (21)..(21): 2'-deoxy-2'-fluoro
  misc_feature (21)..(21): 3'-3 attached terminal deoxyabasic moiety
aucuuuuaacucucuucaggu

SEQ ID NO: 395 - DNA, 21 bp, Artificial Sequence
  Description of Artificial Sequence:  Synthetic
  misc_feature (2)..(4): 2'-deoxy-2'-fluoro
  misc_feature (13)..(14): 2'-deoxy-2'-fluoro
  misc_feature (1)..(19): ribonucleotide modified as described
  misc_feature (20)..(20): Phosphorothioate 3'-Internucleotide Linkage
accugaagagaguuaaaagtt

SEQ ID NO: 396 - RNA, 21 nt, Artificial Sequence
  Description of Artificial Sequence:  Synthetic
  misc_feature (1)..(1): 5'-3 attached terminal deoxyabasic moiety
  misc_feature (1)..(1): 2'-deoxy-2'-fluoro
  misc_feature (3)..(3): 2'-deoxy-2'-fluoro
  misc_feature (6)..(7): 2'-deoxy-2'-fluoro
  misc_feature (9)..(9): 2'-deoxy-2'-fluoro
  misc_feature (12)..(12): 2'-deoxy-2'-fluoro
  misc_feature (14)..(17): 2'-deoxy-2'-fluoro
  misc_feature (19)..(20): 2'-deoxy-2'-fluoro
  misc_feature (21)..(21): 3'-3 attached terminal deoxyabasic moiety
ugugucugcggcguuuuauca

SEQ ID NO: 397 - DNA, 21 bp, Artificial Sequence
  Description of Artificial Sequence:  Synthetic
  misc_feature (2)..(2): 2'-deoxy-2'-fluoro
  misc_feature (7)..(7): 2'-deoxy-2'-fluoro
  misc_feature (9)..(10): 2'-deoxy-2'-fluoro
  misc_feature (12)..(12): 2'-deoxy-2'-fluoro
  misc_feature (16)..(16): 2'-deoxy-2'-fluoro
  misc_feature (18)..(18): 2'-deoxy-2'-fluoro
  misc_feature (1)..(19): ribonucleotide modified as described
  misc_feature (20)..(20): Phosphorothioate 3'-Internucleotide Linkage
auaaaacgccgcagacacatt

SEQ ID NO: 398 - RNA, 21 nt, Artificial Sequence
  Description of Artificial Sequence:  Synthetic
  misc_feature (2)..(3): 2'-deoxy-2'-fluoro
  misc_feature (5)..(8): 2'-deoxy-2'-fluoro
  misc_feature (10)..(10): 2'-deoxy-2'-fluoro
  misc_feature (13)..(13): 2'-deoxy-2'-fluoro
  misc_feature (15)..(17): 2'-deoxy-2'-fluoro
  misc_feature (19)..(19): 2'-deoxy-2'-fluoro
  misc_feature (21)..(21): 3'-3 attached terminal deoxyabasic moiety
  misc_feature (21)..(21): 2'-deoxy-2'-fluoro
acuauuuugcggcgucugugu

SEQ ID NO: 399 - DNA, 21 bp, Artificial Sequence
  Description of Artificial Sequence:  Synthetic
  misc_feature (2)..(2): 2'-deoxy-2'-fluoro
  misc_feature (4)..(4): 2'-deoxy-2'-fluoro
  misc_feature (8)..(8): 2'-deoxy-2'-fluoro
  misc_feature (10)..(11): 2'-deoxy-2'-fluoro
  misc_feature (13)..(13): 2'-deoxy-2'-fluoro
  misc_feature (18)..(18): 2'-deoxy-2'-fluoro
  misc_feature (1)..(19): ribonucleotide modified as described
  misc_feature (20)..(20): Phosphorothioate 3'-Internucleotide Linkage
acacagacgccgcaaaauatt

SEQ ID NO: 400 - RNA, 21 nt, Artificial Sequence
  Description of Artificial Sequence:  Synthetic
  misc_feature (1)..(1): 5'-3 attached terminal deoxyabasic moiety
  misc_feature (1)..(4): 2'-deoxy-2'-fluoro
  misc_feature (6)..(7): 2'-deoxy-2'-fluoro
  misc_feature (9)..(10): 2'-deoxy-2'-fluoro
  misc_feature (12)..(12): 2'-deoxy-2'-fluoro
  misc_feature (14)..(17): 2'-deoxy-2'-fluoro
  misc_feature (19)..(21): 2'-deoxy-2'-fluoro
  misc_feature (21)..(21): 3'-3 attached terminal deoxyabasic moiety
uccugcugcuaugccucaucu

SEQ ID NO: 401 - DNA, 21 bp, Artificial Sequence
  Description of Artificial Sequence:  Synthetic
  misc_feature (2)..(2): 2'-deoxy-2'-fluoro
  misc_feature (7)..(7): 2'-deoxy-2'-fluoro
  misc_feature (9)..(9): 2'-deoxy-2'-fluoro
  misc_feature (12)..(12): 2'-deoxy-2'-fluoro
  misc_feature (15)..(15): 2'-deoxy-2'-fluoro
  misc_feature (1)..(19): ribonucleotide modified as described
  misc_feature (20)..(20): Phosphorothioate 3'-Internucleotide Linkage
augaggcauagcagcaggatt

SEQ ID NO: 402 - RNA, 21 nt, Artificial Sequence
  Description of Artificial Sequence:  Synthetic
  misc_feature (1)..(1): 5'-3 attached terminal deoxyabasic moiety
  misc_feature (1)..(3): 2'-deoxy-2'-fluoro
  misc_feature (5)..(8): 2'-deoxy-2'-fluoro
  misc_feature (10)..(10): 2'-deoxy-2'-fluoro
  misc_feature (12)..(13): 2'-deoxy-2'-fluoro
  misc_feature (15)..(16): 2'-deoxy-2'-fluoro
  misc_feature (18)..(21): 2'-deoxy-2'-fluoro
  misc_feature (21)..(21): 3'-3 attached terminal deoxyabasic moiety
ucuacuccguaucgucguccu

SEQ ID NO: 403 - DNA, 21 bp, Artificial Sequence
  Description of Artificial Sequence:  Synthetic
  misc_feature (5)..(5): 2'-deoxy-2'-fluoro
  misc_feature (8)..(8): 2'-deoxy-2'-fluoro
  misc_feature (11)..(11): 2'-deoxy-2'-fluoro
  misc_feature (13)..(13): 2'-deoxy-2'-fluoro
  misc_feature (18)..(18): 2'-deoxy-2'-fluoro
  misc_feature (1)..(19): ribonucleotide modified as described
  misc_feature (20)..(20): Phosphorothioate 3'-Internucleotide Linkage
aggacgacgauacggaguatt

SEQ ID NO: 404 - RNA, 21 nt, Artificial Sequence
  Description of Artificial Sequence:  Synthetic
  misc_feature (1)..(1): 5'-3 attached terminal deoxyabasic moiety
  misc_feature (1)..(1): 2'-deoxy-2'-fluoro
  misc_feature (3)..(3): 2'-deoxy-2'-fluoro
  misc_feature (5)..(6): 2'-deoxy-2'-fluoro
  misc_feature (8)..(10): 2'-deoxy-2'-fluoro
  misc_feature (12)..(14): 2'-deoxy-2'-fluoro
  misc_feature (16)..(21): 2'-deoxy-2'-fluoro
  misc_feature (21)..(21): 3'-3 attached terminal deoxyabasic moiety
uauguugcccguuuguccucu

SEQ ID NO: 405 - DNA, 21 bp, Artificial Sequence
  Description of Artificial Sequence:  Synthetic
  misc_feature (5)..(5): 2'-deoxy-2'-fluoro
  misc_feature (9)..(9): 2'-deoxy-2'-fluoro
  misc_feature (13)..(13): 2'-deoxy-2'-fluoro
  misc_feature (16)..(16): 2'-deoxy-2'-fluoro
  misc_feature (18)..(18): 2'-deoxy-2'-fluoro
  misc_feature (1)..(19): ribonucleotide modified as described
  misc_feature (20)..(20): Phosphorothioate 3'-Internucleotide Linkage
aggacaaacgggcaacauatt

SEQ ID NO: 406 - RNA, 21 nt, Artificial Sequence
  Description of Artificial Sequence:  Synthetic
  misc_feature (1)..(6): 2'-deoxy-2'-fluoro
  misc_feature (1)..(1): 5'-3 attached terminal deoxyabasic moiety
  misc_feature (8)..(10): 2'-deoxy-2'-fluoro
  misc_feature (12)..(14): 2'-deoxy-2'-fluoro
  misc_feature (16)..(17): 2'-deoxy-2'-fluoro
  misc_feature (19)..(19): 2'-deoxy-2'-fluoro
  misc_feature (21)..(21): 2'-deoxy-2'-fluoro
  misc_feature (21)..(21): 3'-3 attached terminal deoxyabasic moiety
ucuccuguuugcccguuguau

SEQ ID NO: 407 - DNA, 21 bp, Artificial Sequence
  Description of Artificial Sequence:  Synthetic
  misc_feature (2)..(2): 2'-deoxy-2'-fluoro
  misc_feature (4)..(4): 2'-deoxy-2'-fluoro
  misc_feature (7)..(7): 2'-deoxy-2'-fluoro
  misc_feature (11)..(11): 2'-deoxy-2'-fluoro
  misc_feature (15)..(15): 2'-deoxy-2'-fluoro
  misc_feature (1)..(19): ribonucleotide modified as described
  misc_feature (20)..(20): Phosphorothioate 3'-Internucleotide Linkage
auacaacgggcaaacaggatt

SEQ ID NO: 408 - RNA, 21 nt, Artificial Sequence
  Description of Artificial Sequence:  Synthetic
  misc_feature (1)..(1): 5'-3 attached terminal deoxyabasic moiety
  misc_feature (1)..(1): 2'-deoxy-2'-fluoro
  misc_feature (3)..(3): 2'-deoxy-2'-fluoro
  misc_feature (5)..(5): 2'-deoxy-2'-fluoro
  misc_feature (7)..(10): 2'-deoxy-2'-fluoro
  misc_feature (12)..(15): 2'-deoxy-2'-fluoro
  misc_feature (17)..(21): 2'-deoxy-2'-fluoro
  misc_feature (21)..(21): 3'-3 attached terminal deoxyabasic moiety
ugugcacuucgcuucaccucu

SEQ ID NO: 409 - DNA, 21 bp, Artificial Sequence
  Description of Artificial Sequence:  Synthetic
  misc_feature (4)..(4): 2'-deoxy-2'-fluoro
  misc_feature (9)..(9): 2'-deoxy-2'-fluoro
  misc_feature (14)..(14): 2'-deoxy-2'-fluoro
  misc_feature (16)..(16): 2'-deoxy-2'-fluoro
  misc_feature (18)..(18): 2'-deoxy-2'-fluoro
  misc_feature (1)..(19): ribonucleotide modified as described
  misc_feature (20)..(20): Phosphorothioate 3'-Internucleotide Linkage
aggugaagcgaagugcacatt

SEQ ID NO: 410 - RNA, 21 nt, Artificial Sequence
  Description of Artificial Sequence:  Synthetic
  misc_feature (1)..(1): 5'-3 attached terminal deoxyabasic moiety
  misc_feature (1)..(5): 2'-deoxy-2'-fluoro
  misc_feature (7)..(10): 2'-deoxy-2'-fluoro
  misc_feature (12)..(15): 2'-deoxy-2'-fluoro
  misc_feature (17)..(17): 2'-deoxy-2'-fluoro
  misc_feature (19)..(21): 2'-deoxy-2'-fluoro
  misc_feature (21)..(21): 3'-3 attached terminal deoxyabasic moiety
ucuccacuucgcuucacgugu

SEQ ID NO: 411 - DNA, 21 bp, Artificial Sequence
  Description of Artificial Sequence:  Synthetic
  misc_feature (2)..(2): 2'-deoxy-2'-fluoro
  misc_feature (4)..(4): 2'-deoxy-2'-fluoro
  misc_feature (6)..(6): 2'-deoxy-2'-fluoro
  misc_feature (11)..(11): 2'-deoxy-2'-fluoro
  misc_feature (16)..(16): 2'-deoxy-2'-fluoro
  misc_feature (1)..(19): ribonucleotide modified as described
  misc_feature (20)..(20): Phosphorothioate 3'-Internucleotide Linkage
acacgugaagcgaaguggatt

SEQ ID NO: 412 - RNA, 21 nt, Artificial Sequence
  Description of Artificial Sequence:  Synthetic
  misc_feature (1)..(1): 5'-3 attached terminal deoxyabasic moiety
  misc_feature (1)..(4): 2'-deoxy-2'-fluoro
  misc_feature (6)..(9): 2'-deoxy-2'-fluoro
  misc_feature (11)..(15): 2'-deoxy-2'-fluoro
  misc_feature (17)..(17): 2'-deoxy-2'-fluoro
  misc_feature (19)..(19): 2'-deoxy-2'-fluoro
  misc_feature (21)..(21): 2'-deoxy-2'-fluoro
  misc_feature (21)..(21): 3'-3 attached terminal deoxyabasic moiety
cuucgcuucaccucugcacgu

SEQ ID NO: 413 - DNA, 21 bp, Artificial Sequence
  Description of Artificial Sequence:  Synthetic
  misc_feature (2)..(2): 2'-deoxy-2'-fluoro
  misc_feature (4)..(4): 2'-deoxy-2'-fluoro
  misc_feature (10)..(10): 2'-deoxy-2'-fluoro
  misc_feature (15)..(15): 2'-deoxy-2'-fluoro
  misc_feature (1)..(19): ribonucleotide modified as described
  misc_feature (20)..(20): Phosphorothioate 3'-Internucleotide Linkage
gugcagaggugaagcgaagtt

SEQ ID NO: 414 - RNA, 21 nt, Artificial Sequence
  Description of Artificial Sequence:  Synthetic
  misc_feature (1)..(1): 5'-3 attached terminal deoxyabasic moiety
  misc_feature (1)..(1): 2'-deoxy-2'-fluoro
  misc_feature (3)..(3): 2'-deoxy-2'-fluoro
  misc_feature (5)..(5): 2'-deoxy-2'-fluoro
  misc_feature (7)..(11): 2'-deoxy-2'-fluoro
  misc_feature (13)..(16): 2'-deoxy-2'-fluoro
  misc_feature (18)..(21): 2'-deoxy-2'-fluoro
  misc_feature (21)..(21): 3'-3 attached terminal deoxyabasic moiety
ugcacgucuccacuucgcuuc

SEQ ID NO: 415 - DNA, 21 bp, Artificial Sequence
  Description of Artificial Sequence:  Synthetic
  misc_feature (5)..(5): 2'-deoxy-2'-fluoro
  misc_feature (10)..(10): 2'-deoxy-2'-fluoro
  misc_feature (16)..(16): 2'-deoxy-2'-fluoro
  misc_feature (18)..(18): 2'-deoxy-2'-fluoro
  misc_feature (1)..(19): ribonucleotide modified as described
  misc_feature (20)..(20): Phosphorothioate 3'-Internucleotide Linkage
gaagcgaaguggagacgugtt

SEQ ID NO: 416 - RNA, 21 nt, Artificial Sequence
  Description of Artificial Sequence:  Synthetic
  misc_feature (1)..(1): 5'-3 attached terminal deoxyabasic moiety
  misc_feature (4)..(5): 2'-deoxy-2'-fluoro
  misc_feature (7)..(7): 2'-deoxy-2'-fluoro
  misc_feature (11)..(11): 2'-deoxy-2'-fluoro
  misc_feature (13)..(13): 2'-deoxy-2'-fluoro
  misc_feature (17)..(18): 2'-deoxy-2'-fluoro
  misc_feature (21)..(21): 2'-deoxy-2'-fluoro
  misc_feature (21)..(21): 3'-3 attached terminal deoxyabasic moiety
aggcuguaggcauaaauuggu

SEQ ID NO: 417 - DNA, 21 bp, Artificial Sequence
  Description of Artificial Sequence:  Synthetic
  misc_feature (1)..(1): 2'-deoxy-2'-fluoro
  misc_feature (4)..(6): 2'-deoxy-2'-fluoro
  misc_feature (8)..(8): 2'-deoxy-2'-fluoro
  misc_feature (10)..(12): 2'-deoxy-2'-fluoro
  misc_feature (14)..(14): 2'-deoxy-2'-fluoro
  misc_feature (17)..(19): 2'-deoxy-2'-fluoro
  misc_feature (1)..(19): ribonucleotide modified as described
  misc_feature (20)..(20): Phosphorothioate 3'-Internucleotide Linkage
caauuuaugccuacagccutt

SEQ ID NO: 418 - RNA, 21 nt, Artificial Sequence
  Description of Artificial Sequence:  Synthetic
  misc_feature (1)..(1): 5'-3 attached terminal deoxyabasic moiety
  misc_feature (1)..(1): 2'-deoxy-2'-fluoro
  misc_feature (4)..(5): 2'-deoxy-2'-fluoro
  misc_feature (9)..(9): 2'-deoxy-2'-fluoro
  misc_feature (11)..(11): 2'-deoxy-2'-fluoro
  misc_feature (15)..(15): 2'-deoxy-2'-fluoro
  misc_feature (17)..(18): 2'-deoxy-2'-fluoro
  misc_feature (21)..(21): 3'-3 attached terminal deoxyabasic moiety
ugguuaaauacggaugucgga

SEQ ID NO: 419 - DNA, 21 bp, Artificial Sequence
  Description of Artificial Sequence:  Synthetic
  misc_feature (1)..(3): 2'-deoxy-2'-fluoro
  misc_feature (6)..(6): 2'-deoxy-2'-fluoro
  misc_feature (8)..(10): 2'-deoxy-2'-fluoro
  misc_feature (12)..(12): 2'-deoxy-2'-fluoro
  misc_feature (14)..(16): 2'-deoxy-2'-fluoro
  misc_feature (19)..(19): 2'-deoxy-2'-fluoro
  misc_feature (1)..(19): ribonucleotide modified as described
  misc_feature (20)..(20): Phosphorothioate 3'-Internucleotide Linkage
uccgacauccguauuuaactt

SEQ ID NO: 420 - DNA, 21 bp, Artificial Sequence
  Description of Artificial Sequence:  Synthetic
  misc_feature (1)..(1): 2'-deoxy-2'-fluoro
  misc_feature (1)..(1): 5'-3 attached terminal deoxyabasic moiety
  misc_feature (2)..(2): 2'-deoxy
  misc_feature (3)..(3): 2'-deoxy-2'-fluoro
  misc_feature (4)..(4): 2'-deoxy
  misc_feature (5)..(5): 2'-deoxy-2'-fluoro
  misc_feature (6)..(6): 2'-deoxy
  misc_feature (7)..(10): 2'-deoxy-2'-fluoro
  misc_feature (11)..(11): 2'-deoxy
  misc_feature (12)..(15): 2'-deoxy-2'-fluoro
  misc_feature (16)..(16): 2'-deoxy
  misc_feature (17)..(19): 2'-deoxy-2'-fluoro
  misc_feature (1)..(19): ribonucleotide modified as described
  misc_feature (21)..(21): 3'-3 attached terminal deoxyabasic moiety
ugugcacuucgcuucaccutt

SEQ ID NO: 421 - DNA, 21 bp, Artificial Sequence
  Description of Artificial Sequence:  Synthetic
  misc_feature (1)..(3): 2'-O-methyl
  misc_feature (4)..(4): 2'-deoxy-2'-fluoro
  misc_feature (5)..(8): 2'-O-methyl
  misc_feature (9)..(9): 2'-deoxy-2'-fluoro
  misc_feature (10)..(13): 2'-O-methyl
  misc_feature (14)..(14): 2'-deoxy-2'-fluoro
  misc_feature (15)..(15): 2'-O-methyl
  misc_feature (16)..(16): 2'-deoxy-2'-fluoro
  misc_feature (17)..(17): 2'-O-methyl
  misc_feature (18)..(18): 2'-deoxy-2'-fluoro
  misc_feature (19)..(19): 2'-O-methyl
  misc_feature (1)..(19): ribonucleotide modified as described
  misc_feature (20)..(20): Phosphorothioate 3'-Internucleotide Linkage
aggugaagcgaagugcacatt

SEQ ID NO: 422 - DNA, 21 bp, Artificial Sequence
  Description of Artificial Sequence:  Synthetic
  misc_feature (1)..(5): 2'-deoxy-2'-fluoro
  misc_feature (1)..(1): 5'-3 attached terminal deoxyabasic moiety
  misc_feature (6)..(6): 2'-deoxy
  misc_feature (7)..(10): 2'-deoxy-2'-fluoro
  misc_feature (11)..(11): 2'-deoxy
  misc_feature (12)..(15): 2'-deoxy-2'-fluoro
  misc_feature (16)..(16): 2'-deoxy
  misc_feature (17)..(17): 2'-deoxy-2'-fluoro
  misc_feature (18)..(18): 2'-deoxy
  misc_feature (19)..(19): 2'-deoxy-2'-fluoro
  misc_feature (1)..(19): ribonucleotide modified as described
  misc_feature (21)..(21): 3'-3 attached terminal deoxyabasic moiety
ucuccacuucgcuucacgutt

SEQ ID NO: 423 - DNA, 21 bp, Artificial Sequence
  Description of Artificial Sequence:  Synthetic
  misc_feature (1)..(1): 2'-O-methyl
  misc_feature (2)..(2): 2'-deoxy-2'-fluoro
  misc_feature (3)..(3): 2'-O-methyl
  misc_feature (4)..(4): 2'-deoxy-2'-fluoro
  misc_feature (5)..(5): 2'-O-methyl
  misc_feature (6)..(6): 2'-deoxy-2'-fluoro
  misc_feature (7)..(7): 2'-O-methyl
  misc_feature (8)..(8): 2'-deoxy-2'-fluoro
  misc_feature (9)..(12): 2'-O-methyl
  misc_feature (13)..(13): 2'-deoxy-2'-fluoro
  misc_feature (14)..(17): 2'-O-methyl
  misc_feature (18)..(18): 2'-deoxy-2'-fluoro
  misc_feature (19)..(19): 2'-O-methyl
  misc_feature (1)..(19): ribonucleotide modified as described
  misc_feature (20)..(20): Phosphorothioate 3'-Internucleotide Linkage
gcacacgugaagcgaagugtt

SEQ ID NO: 424 - DNA, 21 bp, Artificial Sequence
  Description of Artificial Sequence:  Synthetic
  misc_feature (1)..(3): 2'-deoxy
  misc_feature (4)..(4): 2'-deoxy-2'-fluoro
  misc_feature (5)..(8): 2'-deoxy
  misc_feature (9)..(9): 2'-deoxy-2'-fluoro
  misc_feature (10)..(13): 2'-deoxy
  misc_feature (14)..(14): 2'-deoxy-2'-fluoro
  misc_feature (15)..(15): 2'-deoxy
  misc_feature (16)..(16): 2'-deoxy-2'-fluoro
  misc_feature (17)..(17): 2'-deoxy
  misc_feature (18)..(18): 2'-deoxy-2'-fluoro
  misc_feature (19)..(19): 2'-deoxy
  misc_feature (1)..(19): ribonucleotide modified as described
  misc_feature (20)..(20): Phosphorothioate 3'-Internucleotide Linkage
aggugaagcgaagugcacatt

SEQ ID NO: 425 - DNA, 21 bp, Artificial Sequence
  Description of Artificial Sequence:  Synthetic
  misc_feature (2)..(2): 2'-deoxy-2'-fluoro
  misc_feature (4)..(4): 2'-deoxy-2'-fluoro
  misc_feature (6)..(6): 2'-deoxy-2'-fluoro
  misc_feature (8)..(8): 2'-deoxy-2'-fluoro
  misc_feature (13)..(13): 2'-deoxy-2'-fluoro
  misc_feature (18)..(18): 2'-deoxy-2'-fluoro
  misc_feature (1)..(19): ribonucleotide modified as described
  misc_feature (20)..(20): Phosphorothioate 3'-Internucleotide Linkage
gcacacgugaagcgaagugtt

SEQ ID NO: 426 - RNA, 21 nt, Artificial Sequence
  Description of Artificial Sequence:  Synthetic
ugugcacuucgcuucaccucu

SEQ ID NO: 427 - RNA, 21 nt, Artificial Sequence
  Description of Artificial Sequence:  Synthetic
aggugaagcgaagugcacacg

SEQ ID NO: 428 - DNA, 21 bp, Artificial Sequence
  Description of Artificial Sequence:  Synthetic
  misc_feature (1)..(1): 2'-O-methyl
  misc_feature (1)..(1): 5'-3 attached terminal deoxyabasic moiety
  misc_feature (2)..(2): 2'-deoxy
  misc_feature (3)..(3): 2'-O-methyl
  misc_feature (4)..(4): 2'-deoxy
  misc_feature (5)..(5): 2'-O-methyl
  misc_feature (6)..(6): 2'-deoxy
  misc_feature (7)..(10): 2'-O-methyl
  misc_feature (11)..(11): 2'-deoxy
  misc_feature (12)..(15): 2'-O-methyl
  misc_feature (16)..(16): 2'-deoxy
  misc_feature (17)..(19): 2'-O-methyl
  misc_feature (1)..(19): ribonucleotide modified as described
  misc_feature (21)..(21): 3'-3 attached terminal deoxyabasic moiety
ugugcacuucgcuucaccutt

SEQ ID NO: 429 - DNA, 21 bp, Artificial Sequence
  Description of Artificial Sequence:  Synthetic
  misc_feature (1)..(19): ribonucleotide modified as described
  misc_feature (20)..(20): Phosphorothioate 3'-Internucleotide Linkage
aggugaagcgaagugcacatt

SEQ ID NO: 430 - DNA, 21 bp, Artificial Sequence
  Description of Artificial Sequence:  Synthetic
  misc_feature (1)..(3): 2'-O-methyl
  misc_feature (1)..(1): 5'-3 attached terminal deoxyabasic moiety
  misc_feature (5)..(5): 2'-O-methyl
  misc_feature (8)..(8): 2'-O-methyl
  misc_feature (10)..(11): 2'-O-methyl
  misc_feature (13)..(15): 2'-O-methyl
  misc_feature (18)..(18): 2'-O-methyl
  misc_feature (1)..(19): ribonucleotide modified as described
  misc_feature (21)..(21): 3'-3 attached terminal deoxyabasic moiety
cuugugguacugccugauatt

SEQ ID NO: 431 - DNA, 21 bp, Artificial Sequence
  Description of Artificial Sequence:  Synthetic
  misc_feature (1)..(1): 2'-O-methyl
  misc_feature (3)..(4): 2'-O-methyl
  misc_feature (8)..(8): 2'-O-methyl
  misc_feature (11)..(11): 2'-O-methyl
  misc_feature (13)..(14): 2'-O-methyl
  misc_feature (16)..(16): 2'-O-methyl
  misc_feature (1)..(19): ribonucleotide modified as described
  misc_feature (20)..(20): Phosphorothioate 3'-Internucleotide Linkage
uaucaggcaguaccacaagtt

SEQ ID NO: 432 - DNA, 21 bp, Artificial Sequence
  Description of Artificial Sequence:  Synthetic
  misc_feature (1)..(1): 5'-3 attached terminal deoxyabasic moiety
  misc_feature (2)..(2): 2'-O-methyl
  misc_feature (5)..(7): 2'-O-methyl
  misc_feature (9)..(10): 2'-O-methyl
  misc_feature (12)..(12): 2'-O-methyl
  misc_feature (15)..(15): 2'-O-methyl
  misc_feature (17)..(19): 2'-O-methyl
  misc_feature (1)..(19): ribonucleotide modified as described
  misc_feature (21)..(21): 3'-3 attached terminal deoxyabasic moiety
auaguccgucaugguguuctt

SEQ ID NO: 433 - DNA, 21 bp, Artificial Sequence
  Description of Artificial Sequence:  Synthetic
  misc_feature (4)..(4): 2'-O-methyl
  misc_feature (6)..(7): 2'-O-methyl
  misc_feature (9)..(9): 2'-O-methyl
  misc_feature (12)..(12): 2'-O-methyl
  misc_feature (16)..(17): 2'-O-methyl
  misc_feature (19)..(19): 2'-O-methyl
  misc_feature (1)..(19): ribonucleotide modified as described
  misc_feature (20)..(20): Phosphorothioate 3'-Internucleotide Linkage
gaacaccaugacggacuautt

SEQ ID NO: 434 - DNA, 21 bp, Artificial Sequence
  Description of Artificial Sequence:  Synthetic
  misc_feature (1)..(2): 2'-O-methyl
  misc_feature (1)..(1): 5'-3 attached terminal deoxyabasic moiety
  misc_feature (4)..(6): 2'-O-methyl
  misc_feature (9)..(9): 2'-O-methyl
  misc_feature (14)..(14): 2'-O-methyl
  misc_feature (16)..(18): 2'-O-methyl
  misc_feature (1)..(19): ribonucleotide modified as described
  misc_feature (21)..(21): 3'-3 attached terminal deoxyabasic moiety
cugccugauagggugcuugtt

SEQ ID NO: 435 - DNA, 21 bp, Artificial Sequence
  Description of Artificial Sequence:  Synthetic
  misc_feature (1)..(1): 2'-O-methyl
  misc_feature (5)..(5): 2'-O-methyl
  misc_feature (7)..(10): 2'-O-methyl
  misc_feature (12)..(13): 2'-O-methyl
  misc_feature (17)..(17): 2'-O-methyl
  misc_feature (1)..(19): ribonucleotide modified as described
  misc_feature (20)..(20): Phosphorothioate 3'-Internucleotide Linkage
caagcacccuaucaggcagtt

SEQ ID NO: 436 - DNA, 21 bp, Artificial Sequence
  Description of Artificial Sequence:  Synthetic
  misc_feature (1)..(1): 5'-3 attached terminal deoxyabasic moiety
  misc_feature (2)..(4): 2'-O-methyl
  misc_feature (6)..(6): 2'-O-methyl
  misc_feature (11)..(11): 2'-O-methyl
  misc_feature (14)..(16): 2'-O-methyl
  misc_feature (18)..(19): 2'-O-methyl
  misc_feature (1)..(19): ribonucleotide modified as described
  misc_feature (21)..(21): 3'-3 attached terminal deoxyabasic moiety
guucgugggauaguccguctt

SEQ ID NO: 437 - DNA, 21 bp, Artificial Sequence
  Description of Artificial Sequence:  Synthetic
  misc_feature (3)..(3): 2'-O-methyl
  misc_feature (7)..(8): 2'-O-methyl
  misc_feature (10)..(13): 2'-O-methyl
  misc_feature (15)..(15): 2'-O-methyl
  misc_feature (19)..(19): 2'-O-methyl
  misc_feature (1)..(19): ribonucleotide modified as described
  misc_feature (20)..(20): Phosphorothioate 3'-Internucleotide Linkage
gacggacuaucccacgaactt

SEQ ID NO: 438 - DNA, 21 bp, Artificial Sequence
  Description of Artificial Sequence:  Synthetic
  misc_feature (1)..(3): 2'-O-methyl
  misc_feature (1)..(1): 5'-3 attached terminal deoxyabasic moiety
  misc_feature (6)..(6): 2'-O-methyl
  misc_feature (11)..(11): 2'-O-methyl
  misc_feature (13)..(15): 2'-O-methyl
  misc_feature (17)..(17): 2'-O-methyl
  misc_feature (1)..(19): ribonucleotide modified as described
  misc_feature (21)..(21): 3'-3 attached terminal deoxyabasic moiety
ccugauagggugcuugcgatt

SEQ ID NO: 439 - DNA, 21 bp, Artificial Sequence
  Description of Artificial Sequence:  Synthetic
  misc_feature (1)..(2): 2'-O-methyl
  misc_feature (4)..(4): 2'-O-methyl
  misc_feature (8)..(8): 2'-O-methyl
  misc_feature (10)..(13): 2'-O-methyl
  misc_feature (15)..(16): 2'-O-methyl
  misc_feature (1)..(19): ribonucleotide modified as described
  misc_feature (20)..(20): Phosphorothioate 3'-Internucleotide Linkage
ucgcaagcacccuaucaggtt

SEQ ID NO: 440 - DNA, 21 bp, Artificial Sequence
  Description of Artificial Sequence:  Synthetic
  misc_feature (1)..(1): 5'-3 attached terminal deoxyabasic moiety
  misc_feature (3)..(3): 2'-O-methyl
  misc_feature (5)..(7): 2'-O-methyl
  misc_feature (9)..(9): 2'-O-methyl
  misc_feature (14)..(14): 2'-O-methyl
  misc_feature (17)..(19): 2'-O-methyl
  misc_feature (1)..(19): ribonucleotide modified as described
  misc_feature (21)..(21): 3'-3 attached terminal deoxyabasic moiety
agcguucgugggauagucctt

SEQ ID NO: 441 - DNA, 21 bp, Artificial Sequence
  Description of Artificial Sequence:  Synthetic
  misc_feature (4)..(5): 2'-O-methyl
  misc_feature (7)..(10): 2'-O-methyl
  misc_feature (12)..(12): 2'-O-methyl
  misc_feature (16)..(16): 2'-O-methyl
  misc_feature (18)..(19): 2'-O-methyl
  misc_feature (1)..(19): ribonucleotide modified as described
  misc_feature (20)..(20): Phosphorothioate 3'-Internucleotide Linkage
ggacuaucccacgaacgcutt

SEQ ID NO: 442 - DNA, 21 bp, Artificial Sequence
  Description of Artificial Sequence:  Synthetic
  misc_feature (1)..(4): 2'-O-methyl
  misc_feature (1)..(1): 5'-3 attached terminal deoxyabasic moiety
  misc_feature (11)..(14): 2'-O-methyl
  misc_feature (16)..(16): 2'-O-methyl
  misc_feature (1)..(19): ribonucleotide modified as described
  misc_feature (21)..(21): 3'-3 attached terminal deoxyabasic moiety
ccccgggaggucucguagatt

SEQ ID NO: 443 - DNA, 21 bp, Artificial Sequence
  Description of Artificial Sequence:  Synthetic
  misc_feature (1)..(3): 2'-O-methyl
  misc_feature (5)..(5): 2'-O-methyl
  misc_feature (10)..(15): 2'-O-methyl
  misc_feature (1)..(19): ribonucleotide modified as described
  misc_feature (20)..(20): Phosphorothioate 3'-Internucleotide Linkage
ucuacgagaccucccggggtt

SEQ ID NO: 444 - DNA, 21 bp, Artificial Sequence
  Description of Artificial Sequence:  Synthetic
  misc_feature (1)..(1): 5'-3 attached terminal deoxyabasic moiety
  misc_feature (4)..(4): 2'-O-methyl
  misc_feature (6)..(9): 2'-O-methyl
  misc_feature (16)..(19): 2'-O-methyl
  misc_feature (1)..(19): ribonucleotide modified as described
  misc_feature (21)..(21): 3'-3 attached terminal deoxyabasic moiety
agaugcucuggagggcccctt

SEQ ID NO: 445 - DNA, 21 bp, Artificial Sequence
  Description of Artificial Sequence:  Synthetic
  misc_feature (5)..(10): 2'-O-methyl
  misc_feature (15)..(15): 2'-O-methyl
  misc_feature (17)..(19): 2'-O-methyl
  misc_feature (1)..(19): ribonucleotide modified as described
  misc_feature (20)..(20): Phosphorothioate 3'-Internucleotide Linkage
ggggcccuccagagcaucutt

SEQ ID NO: 446 - DNA, 21 bp, Artificial Sequence
  Description of Artificial Sequence:  Synthetic
  misc_feature (1)..(3): 2'-O-methyl
  misc_feature (1)..(1): 5'-3 attached terminal deoxyabasic moiety
  misc_feature (10)..(13): 2'-O-methyl
  misc_feature (15)..(15): 2'-O-methyl
  misc_feature (19)..(19): 2'-O-methyl
  misc_feature (1)..(19): ribonucleotide modified as described
  misc_feature (21)..(21): 3'-3 attached terminal deoxyabasic moiety
cccgggaggucucguagactt

SEQ ID NO: 447 - DNA, 21 bp, Artificial Sequence
  Description of Artificial Sequence:  Synthetic
  misc_feature (2)..(4): 2'-O-methyl
  misc_feature (6)..(6): 2'-O-methyl
  misc_feature (11)..(16): 2'-O-methyl
  misc_feature (1)..(19): ribonucleotide modified as described
  misc_feature (20)..(20): Phosphorothioate 3'-Internucleotide Linkage
gucuacgagaccucccgggtt

SEQ ID NO: 448 - DNA, 21 bp, Artificial Sequence
  Description of Artificial Sequence:  Synthetic
  misc_feature (1)..(1): 2'-O-methyl
  misc_feature (1)..(1): 5'-3 attached terminal deoxyabasic moiety
  misc_feature (5)..(5): 2'-O-methyl
  misc_feature (7)..(10): 2'-O-methyl
  misc_feature (17)..(19): 2'-O-methyl
  misc_feature (1)..(19): ribonucleotide modified as described
  misc_feature (21)..(21): 3'-3 attached terminal deoxyabasic moiety
cagaugcucuggagggccctt

SEQ ID NO: 449 - DNA, 21 bp, Artificial Sequence
  Description of Artificial Sequence:  Synthetic
  misc_feature (4)..(9): 2'-O-methyl
  misc_feature (14)..(14): 2'-O-methyl
  misc_feature (16)..(18): 2'-O-methyl
  misc_feature (1)..(19): ribonucleotide modified as described
  misc_feature (20)..(20): Phosphorothioate 3'-Internucleotide Linkage
gggcccuccagagcaucugtt

SEQ ID NO: 450 - DNA, 21 bp, Artificial Sequence
  Description of Artificial Sequence:  Synthetic
  misc_feature (1)..(2): 2'-O-methyl
  misc_feature (1)..(1): 5'-3 attached terminal deoxyabasic moiety
  misc_feature (9)..(12): 2'-O-methyl
  misc_feature (14)..(14): 2'-O-methyl
  misc_feature (18)..(19): 2'-O-methyl
  misc_feature (1)..(19): ribonucleotide modified as described
  misc_feature (21)..(21): 3'-3 attached terminal deoxyabasic moiety
ccgggaggucucguagacctt

SEQ ID NO: 451 - DNA, 21 bp, Artificial Sequence
  Description of Artificial Sequence:  Synthetic
  misc_feature (3)..(5): 2'-O-methyl
  misc_feature (7)..(7): 2'-O-methyl
  misc_feature (12)..(17): 2'-O-methyl
  misc_feature (1)..(19): ribonucleotide modified as described
  misc_feature (20)..(20): Phosphorothioate 3'-Internucleotide Linkage
ggucuacgagaccucccggtt

SEQ ID NO: 452 - DNA, 21 bp, Artificial Sequence
  Description of Artificial Sequence:  Synthetic
  misc_feature (1)..(2): 2'-O-methyl
  misc_feature (1)..(1): 5'-3 attached terminal deoxyabasic moiety
  misc_feature (6)..(6): 2'-O-methyl
  misc_feature (8)..(11): 2'-O-methyl
  misc_feature (18)..(19): 2'-O-methyl
  misc_feature (1)..(19): ribonucleotide modified as described
  misc_feature (21)..(21): 3'-3 attached terminal deoxyabasic moiety
ccagaugcucuggagggcctt

SEQ ID NO: 453 - DNA, 21 bp, Artificial Sequence
  Description of Artificial Sequence:  Synthetic
  misc_feature (3)..(8): 2'-O-methyl
  misc_feature (13)..(13): 2'-O-methyl
  misc_feature (15)..(17): 2'-O-methyl
  misc_feature (1)..(19): ribonucleotide modified as described
  misc_feature (20)..(20): Phosphorothioate 3'-Internucleotide Linkage
ggcccuccagagcaucuggtt

SEQ ID NO: 454 - DNA, 21 bp, Artificial Sequence
  Description of Artificial Sequence:  Synthetic
  misc_feature (1)..(1): 2'-O-methyl
  misc_feature (1)..(1): 5'-3 attached terminal deoxyabasic moiety
  misc_feature (8)..(11): 2'-O-methyl
  misc_feature (13)..(13): 2'-O-methyl
  misc_feature (17)..(18): 2'-O-methyl
  misc_feature (1)..(19): ribonucleotide modified as described
  misc_feature (21)..(21): 3'-3 attached terminal deoxyabasic moiety
cgggaggucucguagaccgtt

SEQ ID NO: 455 - DNA, 21 bp, Artificial Sequence
  Description of Artificial Sequence:  Synthetic
  misc_feature (1)..(1): 2'-O-methyl
  misc_feature (4)..(6): 2'-O-methyl
  misc_feature (8)..(8): 2'-O-methyl
  misc_feature (13)..(18): 2'-O-methyl
  misc_feature (1)..(19): ribonucleotide modified as described
  misc_feature (20)..(20): Phosphorothioate 3'-Internucleotide Linkage
cggucuacgagaccucccgtt

SEQ ID NO: 456 - DNA, 21 bp, Artificial Sequence
  Description of Artificial Sequence:  Synthetic
  misc_feature (1)..(1): 5'-3 attached terminal deoxyabasic moiety
  misc_feature (2)..(3): 2'-O-methyl
  misc_feature (7)..(7): 2'-O-methyl
  misc_feature (9)..(12): 2'-O-methyl
  misc_feature (19)..(19): 2'-O-methyl
  misc_feature (1)..(19): ribonucleotide modified as described
  misc_feature (21)..(21): 3'-3 attached terminal deoxyabasic moiety
gccagaugcucuggagggctt

SEQ ID NO: 457 - DNA, 21 bp, Artificial Sequence
  Description of Artificial Sequence:  Synthetic
  misc_feature (2)..(7): 2'-O-methyl
  misc_feature (12)..(12): 2'-O-methyl
  misc_feature (14)..(16): 2'-O-methyl
  misc_feature (19)..(19): 2'-O-methyl
  misc_feature (1)..(19): ribonucleotide modified as described
  misc_feature (20)..(20): Phosphorothioate 3'-Internucleotide Linkage
gcccuccagagcaucuggctt

SEQ ID NO: 458 - DNA, 21 bp, Artificial Sequence
  Description of Artificial Sequence:  Synthetic
  misc_feature (1)..(1): 5'-3 attached terminal deoxyabasic moiety
  misc_feature (7)..(10): 2'-O-methyl
  misc_feature (12)..(12): 2'-O-methyl
  misc_feature (16)..(17): 2'-O-methyl
  misc_feature (19)..(19): 2'-O-methyl
  misc_feature (1)..(19): ribonucleotide modified as described
  misc_feature (21)..(21): 3'-3 attached terminal deoxyabasic moiety
gggaggucucguagaccgutt

SEQ ID NO: 459 - DNA, 21 bp, Artificial Sequence
  Description of Artificial Sequence:  Synthetic
  misc_feature (2)..(2): 2'-O-methyl
  misc_feature (5)..(7): 2'-O-methyl
  misc_feature (9)..(9): 2'-O-methyl
  misc_feature (14)..(19): 2'-O-methyl
  misc_feature (1)..(19): ribonucleotide modified as described
  misc_feature (20)..(20): Phosphorothioate 3'-Internucleotide Linkage
acggucuacgagaccuccctt

SEQ ID NO: 460 - DNA, 21 bp, Artificial Sequence
  Description of Artificial Sequence:  Synthetic
  misc_feature (1)..(1): 2'-O-methyl
  misc_feature (1)..(1): 5'-3 attached terminal deoxyabasic moiety
  misc_feature (3)..(4): 2'-O-methyl
  misc_feature (8)..(8): 2'-O-methyl
  misc_feature (10)..(13): 2'-O-methyl
  misc_feature (1)..(19): ribonucleotide modified as described
  misc_feature (21)..(21): 3'-3 attached terminal deoxyabasic moiety
ugccagaugcucuggagggtt

SEQ ID NO: 461 - DNA, 21 bp, Artificial Sequence
  Description of Artificial Sequence:  Synthetic
  misc_feature (1)..(6): 2'-O-methyl
  misc_feature (11)..(11): 2'-O-methyl
  misc_feature (13)..(15): 2'-O-methyl
  misc_feature (18)..(18): 2'-O-methyl
  misc_feature (1)..(19): ribonucleotide modified as described
  misc_feature (20)..(20): Phosphorothioate 3'-Internucleotide Linkage
cccuccagagcaucuggcatt

SEQ ID NO: 462 - DNA, 34 bp, Artificial Sequence
  Description of Artificial Sequence:  Synthetic
  misc_feature (1)..(32): ribonucleotide modified as described
ucucguagaccuuggucuacgagaccucccggtt

SEQ ID NO: 463 - DNA, 32 bp, Artificial Sequence
  Description of Artificial Sequence:  Synthetic
  misc_feature (1)..(30): ribonucleotide modified as described
ucguagaccuuggucuacgagaccucccggtt

SEQ ID NO: 464 - DNA, 30 bp, Artificial Sequence
  Description of Artificial Sequence:  Synthetic
  misc_feature (1)..(28): ribonucleotide modified as described
guagaccuuggucuacgagaccucccggtt

SEQ ID NO: 465 - DNA, 28 bp, Artificial Sequence
  Description of Artificial Sequence:  Synthetic
  misc_feature (1)..(26): ribonucleotide modified as described
agaccuuggucuacgagaccucccggtt

SEQ ID NO: 466 - RNA, 32 nt, Artificial Sequence
  Description of Artificial Sequence:  Synthetic
ggucuacgagaccucccgguuccgggaggucu

SEQ ID NO: 467 - RNA, 30 nt, Artificial Sequence
  Description of Artificial Sequence:  Synthetic
ggucuacgagaccucccgguuccgggaggu

SEQ ID NO: 468 - RNA, 28 nt, Artificial Sequence
  Description of Artificial Sequence:  Synthetic
ggucuacgagaccucccgguuccgggag

SEQ ID NO: 469 - RNA, 26 nt, Artificial Sequence
  Description of Artificial Sequence:  Synthetic
ggucuacgagaccucccgguuccggg

SEQ ID NO: 470 - DNA, 35 bp, Artificial Sequence
  Description of Artificial Sequence:  Synthetic
  misc_feature (1)..(33): ribonucleotide modified as described
cucguagaccgaaaggucuacgagaccucccggtt

SEQ ID NO: 471 - DNA, 33 bp, Artificial Sequence
  Description of Artificial Sequence:  Synthetic
  misc_feature (1)..(31): ribonucleotide modified as described
cguagaccgaaaggucuacgagaccucccggtt

SEQ ID NO: 472 - DNA, 31 bp, Artificial Sequence
  Description of Artificial Sequence:  Synthetic
  misc_feature (1)..(29): ribonucleotide modified as described
uagaccgaaaggucuacgagaccucccggtt

SEQ ID NO: 473 - DNA, 29 bp, Artificial Sequence
  Description of Artificial Sequence:  Synthetic
  misc_feature (1)..(27): ribonucleotide modified as described
gaccgaaaggucuacgagaccucccggtt

SEQ ID NO: 474 - RNA, 35 nt, Artificial Sequence
  Description of Artificial Sequence:  Synthetic
ggucuacgagaccucccgguugaaaccgggagguc

SEQ ID NO: 475 - RNA, 33 nt, Artificial Sequence
  Description of Artificial Sequence:  Synthetic
ggucuacgagaccucccgguugaaaccgggagg

SEQ ID NO: 476 - RNA, 31 nt, Artificial Sequence
  Description of Artificial Sequence:  Synthetic
ggucuacgagaccucccgguugaaaccggga

SEQ ID NO: 477 - RNA, 29 nt, Artificial Sequence
  Description of Artificial Sequence:  Synthetic
ggucuacgagaccucccgguugaaaccgg

SEQ ID NO: 478 - DNA, 40 bp, Artificial Sequence
  Description of Artificial Sequence:  Synthetic
  misc_feature (1)..(28): ribonucleotide modified as described
cguagaccuuuuuguguagggucuacgagaccucccggtt

SEQ ID NO: 479 - DNA, 38 bp, Artificial Sequence
  Description of Artificial Sequence:  Synthetic
  misc_feature (1)..(36): ribonucleotide modified as described
uagaccuuuuuguguagggucuacgagaccucccggtt

SEQ ID NO: 480 - DNA, 36 bp, Artificial Sequence
  Description of Artificial Sequence:  Synthetic
  misc_feature (1)..(34): ribonucleotide modified as described
gaccuuuuuguguagggucuacgagaccucccggtt

SEQ ID NO: 481 - DNA, 34 bp, Artificial Sequence
  Description of Artificial Sequence:  Synthetic
  misc_feature (1)..(32): ribonucleotide modified as described
ccuuuuuguguagggucuacgagaccucccggtt

SEQ ID NO: 482 - RNA, 40 nt, Artificial Sequence
  Description of Artificial Sequence:  Synthetic
ggucuacgagaccucccgguuuuuguguagccgggagguc

SEQ ID NO: 483 - RNA, 38 nt, Artificial Sequence
  Description of Artificial Sequence:  Synthetic
ggucuacgagaccucccgguuuuuguguagccgggagg

SEQ ID NO: 484 - RNA, 36 nt, Artificial Sequence
  Description of Artificial Sequence:  Synthetic
ggucuacgagaccucccgguuuuuguguagccggga

SEQ ID NO: 485 - RNA, 34 nt, Artificial Sequence
  Description of Artificial Sequence:  Synthetic
ggucuacgagaccucccgguuuuuguguagccgg

SEQ ID NO: 486 - DNA, 34 bp, Artificial Sequence; identical to SEQ ID NO: 462
  Description of Artificial Sequence:  Synthetic
  misc_feature (1)..(4): 2'-O-methyl
  misc_feature (6)..(6): 2'-O-methyl
  misc_feature (10)..(13): 2'-O-methyl
  misc_feature (16)..(18): 2'-O-methyl
  misc_feature (20)..(20): 2'-O-methyl
  misc_feature (25)..(30): 2'-O-methyl
  misc_feature (1)..(32): ribonucleotide modified as described
  misc_feature (33)..(33): Phosphorothioate 3'-Internucleotide Linkage

SEQ ID NO: 487 - DNA, 32 bp, Artificial Sequence; identical to SEQ ID NO: 463
  Description of Artificial Sequence:  Synthetic
  misc_feature (1)..(2): 2'-O-methyl
  misc_feature (4)..(4): 2'-O-methyl
  misc_feature (8)..(11): 2'-O-methyl
  misc_feature (14)..(16): 2'-O-methyl
  misc_feature (18)..(18): 2'-O-methyl
  misc_feature (23)..(28): 2'-O-methyl
  misc_feature (1)..(30): ribonucleotide modified as described
  misc_feature (31)..(31): Phosphorothioate 3'-Internucleotide Linkage

SEQ ID NO: 488 - DNA, 30 bp, Artificial Sequence; identical to SEQ ID NO: 464
  Description of Artificial Sequence:  Synthetic
  misc_feature (2)..(2): 2'-O-methyl
  misc_feature (6)..(9): 2'-O-methyl
  misc_feature (12)..(14): 2'-O-methyl
  misc_feature (16)..(16): 2'-O-methyl
  misc_feature (21)..(26): 2'-O-methyl
  misc_feature (1)..(28): ribonucleotide modified as described
  misc_feature (29)..(29): Phosphorothioate 3'-Internucleotide Linkage

SEQ ID NO: 489 - DNA, 28 bp, Artificial Sequence
  Description of Artificial Sequence:  Synthetic
  misc_feature (4)..(7): 2'-O-methyl
  misc_feature (10)..(12): 2'-O-methyl
  misc_feature (14)..(14): 2'-O-methyl
  misc_feature (19)..(24): 2'-O-methyl
  misc_feature (1)..(26): ribonucleotide modified as described
  misc_feature (27)..(27): Phosphorothioate 3'-Internucleotide Linkage
agaccuuggucuacgagaccucccggtt

SEQ ID NO: 490 - RNA, 32 nt, Artificial Sequence; identical to SEQ ID NO: 466
  Description of Artificial Sequence:  Synthetic
  misc_feature (3)..(5): 2'-O-methyl
  misc_feature (7)..(7): 2'-O-methyl
  misc_feature (12)..(17): 2'-O-methyl
  misc_feature (20)..(23): 2'-O-methyl
  misc_feature (30)..(32): 2'-O-methyl

SEQ ID NO: 491 - RNA, 30 nt, Artificial Sequence; identical to SEQ ID NO: 467
  Description of Artificial Sequence:  Synthetic
  misc_feature (3)..(5): 2'-O-methyl
  misc_feature (7)..(7): 2'-O-methyl
  misc_feature (12)..(17): 2'-O-methyl
  misc_feature (20)..(23): 2'-O-methyl
  misc_feature (30)..(30): 2'-O-methyl

SEQ ID NO: 492 - RNA, 28 nt, Artificial Sequence
  Description of Artificial Sequence:  Synthetic
  misc_feature (3)..(5): 2'-O-methyl
  misc_feature (7)..(7): 2'-O-methyl
  misc_feature (12)..(17): 2'-O-methyl
  misc_feature (20)..(23): 2'-O-methyl
ggucuacgagaccucccgguuccgggag

SEQ ID NO: 493 - RNA, 26 nt, Artificial Sequence
  Description of Artificial Sequence:  Synthetic
  misc_feature (3)..(5): 2'-O-methyl
  misc_feature (7)..(7): 2'-O-methyl
  misc_feature (12)..(17): 2'-O-methyl
  misc_feature (20)..(23): 2'-O-methyl
ggucuacgagaccucccgguuccggg

SEQ ID NO: 494 - DNA, 35 bp, Artificial Sequence; identical to SEQ ID NO: 470
  Description of Artificial Sequence:  Synthetic
  misc_feature (1)..(3): 2'-O-methyl
  misc_feature (5)..(5): 2'-O-methyl
  misc_feature (9)..(10): 2'-O-methyl
  misc_feature (17)..(19): 2'-O-methyl
  misc_feature (21)..(21): 2'-O-methyl
  misc_feature (26)..(31): 2'-O-methyl
  misc_feature (1)..(33): ribonucleotide modified as described
  misc_feature (34)..(34): Phosphorothioate 3'-Internucleotide Linkage

SEQ ID NO: 495 - DNA, 33 bp, Artificial Sequence; identical to SEQ ID NO: 471
  Description of Artificial Sequence:  Synthetic
  misc_feature (1)..(1): 2'-O-methyl
  misc_feature (3)..(3): 2'-O-methyl
  misc_feature (7)..(8): 2'-O-methyl
  misc_feature (15)..(17): 2'-O-methyl
  misc_feature (19)..(19): 2'-O-methyl
  misc_feature (24)..(29): 2'-O-methyl
  misc_feature (1)..(31): ribonucleotide modified as described
  misc_feature (32)..(32): Phosphorothioate 3'-Internucleotide Linkage

SEQ ID NO: 496 - DNA, 31 bp, Artificial Sequence; identical to SEQ ID NO: 472
  Description of Artificial Sequence:  Synthetic
  misc_feature (1)..(1): 2'-O-methyl
  misc_feature (5)..(6): 2'-O-methyl
  misc_feature (13)..(15): 2'-O-methyl
  misc_feature (17)..(17): 2'-O-methyl
  misc_feature (22)..(27): 2'-O-methyl
  misc_feature (1)..(29): ribonucleotide modified as described
  misc_feature (30)..(30): Phosphorothioate 3'-Internucleotide Linkage

SEQ ID NO: 497 - DNA, 29 bp, Artificial Sequence
  Description of Artificial Sequence:  Synthetic
  misc_feature (3)..(4): 2'-O-methyl
  misc_feature (11)..(13): 2'-O-methyl
  misc_feature (15)..(15): 2'-O-methyl
  misc_feature (20)..(25): 2'-O-methyl
  misc_feature (1)..(27): ribonucleotide modified as described
  misc_feature (28)..(28): Phosphorothioate 3'-Internucleotide Linkage
gaccgaaaggucuacgagaccucccggtt

SEQ ID NO: 498 - RNA, 35 nt, Artificial Sequence; identical to SEQ ID NO: 474
  Description of Artificial Sequence:  Synthetic
  misc_feature (3)..(5): 2'-O-methyl
  misc_feature (7)..(7): 2'-O-methyl
  misc_feature (12)..(17): 2'-O-methyl
  misc_feature (20)..(21): 2'-O-methyl
  misc_feature (26)..(27): 2'-O-methyl
  misc_feature (34)..(35): 2'-O-methyl

SEQ ID NO: 499 - RNA, 33 nt, Artificial Sequence; identical to SEQ ID NO: 475
  Description of Artificial Sequence:  Synthetic
  misc_feature (3)..(5): 2'-O-methyl
  misc_feature (7)..(7): 2'-O-methyl
  misc_feature (12)..(17): 2'-O-methyl
  misc_feature (20)..(21): 2'-O-methyl
  misc_feature (26)..(27): 2'-O-methyl

SEQ ID NO: 500 - RNA, 31 nt, Artificial Sequence; identical to SEQ ID NO: 476
  Description of Artificial Sequence:  Synthetic
  misc_feature (3)..(5): 2'-O-methyl
  misc_feature (7)..(7): 2'-O-methyl
  misc_feature (12)..(17): 2'-O-methyl
  misc_feature (20)..(21): 2'-O-methyl
  misc_feature (26)..(27): 2'-O-methyl

SEQ ID NO: 501 - RNA, 29 nt, Artificial Sequence
  Description of Artificial Sequence:  Synthetic
  misc_feature (3)..(5): 2'-O-methyl
  misc_feature (7)..(7): 2'-O-methyl
  misc_feature (12)..(17): 2'-O-methyl
  misc_feature (20)..(21): 2'-O-methyl
  misc_feature (26)..(27): 2'-O-methyl
ggucuacgagaccucccgguugaaaccgg

SEQ ID NO: 502 - DNA, 40 bp, Artificial Sequence; identical to SEQ ID NO: 478
  Description of Artificial Sequence:  Synthetic
  misc_feature (1)..(1): 2'-O-methyl
  misc_feature (3)..(3): 2'-O-methyl
  misc_feature (7)..(13): 2'-O-methyl
  misc_feature (15)..(15): 2'-O-methyl
  misc_feature (17)..(17): 2'-O-methyl
  misc_feature (22)..(24): 2'-O-methyl
  misc_feature (26)..(26): 2'-O-methyl
  misc_feature (31)..(36): 2'-O-methyl
  misc_feature (1)..(38): ribonucleotide modified as described
  misc_feature (39)..(39): Phosphorothioate 3'-Internucleotide Linkage

SEQ ID NO: 503 - DNA, 38 bp, Artificial Sequence; identical to SEQ ID NO: 479
  Description of Artificial Sequence:  Synthetic
  misc_feature (1)..(1): 2'-O-methyl
  misc_feature (5)..(11): 2'-O-methyl
  misc_feature (13)..(13): 2'-O-methyl
  misc_feature (15)..(15): 2'-O-methyl
  misc_feature (20)..(22): 2'-O-methyl
  misc_feature (24)..(24): 2'-O-methyl
  misc_feature (29)..(34): 2'-O-methyl
  misc_feature (1)..(36): ribonucleotide modified as described
  misc_feature (37)..(37): Phosphorothioate 3'-Internucleotide Linkage

SEQ ID NO: 504 - DNA, 36 bp, Artificial Sequence; identical to SEQ ID NO: 480
  Description of Artificial Sequence:  Synthetic
  misc_feature (3)..(9): 2'-O-methyl
  misc_feature (11)..(11): 2'-O-methyl
  misc_feature (13)..(13): 2'-O-methyl
  misc_feature (18)..(20): 2'-O-methyl
  misc_feature (22)..(22): 2'-O-methyl
  misc_feature (27)..(32): 2'-O-methyl
  misc_feature (1)..(34): ribonucleotide modified as described
  misc_feature (35)..(35): Phosphorothioate 3'-Internucleotide Linkage

SEQ ID NO: 505 - DNA, 34 bp, Artificial Sequence; identical to SEQ ID NO: 481
  Description of Artificial Sequence:  Synthetic
  misc_feature (1)..(7): 2'-O-methyl
  misc_feature (9)..(9): 2'-O-methyl
  misc_feature (11)..(11): 2'-O-methyl
  misc_feature (16)..(18): 2'-O-methyl
  misc_feature (20)..(20): 2'-O-methyl
  misc_feature (25)..(30): 2'-O-methyl
  misc_feature (1)..(32): ribonucleotide modified as described
  misc_feature (33)..(33): Phosphorothioate 3'-Internucleotide Linkage

SEQ ID NO: 506 - RNA, 40 nt, Artificial Sequence; identical to SEQ ID NO: 482
  Description of Artificial Sequence:  Synthetic
  misc_feature (3)..(5): 2'-O-methyl
  misc_feature (7)..(7): 2'-O-methyl
  misc_feature (12)..(17): 2'-O-methyl
  misc_feature (20)..(24): 2'-O-methyl
  misc_feature (26)..(26): 2'-O-methyl
  misc_feature (28)..(28): 2'-O-methyl
  misc_feature (31)..(32): 2'-O-methyl
  misc_feature (39)..(40): 2'-O-methyl

SEQ ID NO: 507 - RNA, 38 nt, Artificial Sequence; identical to SEQ ID NO: 483
  Description of Artificial Sequence:  Synthetic
  misc_feature (3)..(5): 2'-O-methyl
  misc_feature (7)..(7): 2'-O-methyl
  misc_feature (12)..(17): 2'-O-methyl
  misc_feature (20)..(24): 2'-O-methyl
  misc_feature (26)..(26): 2'-O-methyl
  misc_feature (28)..(28): 2'-O-methyl
  misc_feature (31)..(32): 2'-O-methyl

SEQ ID NO: 508 - RNA, 36 nt, Artificial Sequence; identical to SEQ ID NO: 484
  Description of Artificial Sequence:  Synthetic
  misc_feature (3)..(5): 2'-O-methyl
  misc_feature (7)..(7): 2'-O-methyl
  misc_feature (12)..(17): 2'-O-methyl
  misc_feature (20)..(24): 2'-O-methyl
  misc_feature (26)..(26): 2'-O-methyl
  misc_feature (28)..(28): 2'-O-methyl
  misc_feature (31)..(32): 2'-O-methyl

SEQ ID NO: 509 - RNA, 34 nt, Artificial Sequence; identical to SEQ ID NO: 485
  Description of Artificial Sequence:  Synthetic
  misc_feature (3)..(5): 2'-O-methyl
  misc_feature (7)..(7): 2'-O-methyl
  misc_feature (12)..(17): 2'-O-methyl
  misc_feature (20)..(24): 2'-O-methyl
  misc_feature (26)..(26): 2'-O-methyl
  misc_feature (28)..(28): 2'-O-methyl
  misc_feature (31)..(32): 2'-O-methyl

SEQ ID NO: 510 - DNA, 23 bp, Artificial Sequence
  Description of Artificial Sequence:  Synthetic
  misc_feature (1)..(2): 2'-O-methyl
  misc_feature (5)..(7): 2'-O-methyl
  misc_feature (9)..(9): 2'-O-methyl
  misc_feature (14)..(19): 2'-O-methyl
  misc_feature (1)..(21): ribonucleotide modified as described
  misc_feature (22)..(22): Phosphorothioate 3'-Internucleotide Linkage
acggucuacgagaccucccggtt

SEQ ID NO: 511 - DNA, 22 bp, Artificial Sequence
  Description of Artificial Sequence:  Synthetic
  misc_feature (1)..(1): 2'-O-methyl
  misc_feature (4)..(6): 2'-O-methyl
  misc_feature (8)..(8): 2'-O-methyl
  misc_feature (13)..(18): 2'-O-methyl
  misc_feature (1)..(20): ribonucleotide modified as described
  misc_feature (21)..(21): Phosphorothioate 3'-Internucleotide Linkage
cggucuacgagaccucccggtt

SEQ ID NO: 512 - DNA, 20 bp, Artificial Sequence
  Description of Artificial Sequence:  Synthetic
  misc_feature (2)..(4): 2'-O-methyl
  misc_feature (6)..(6): 2'-O-methyl
  misc_feature (11)..(16): 2'-O-methyl
  misc_feature (1)..(18): ribonucleotide modified as described
  misc_feature (19)..(19): Phosphorothioate 3'-Internucleotide Linkage
gucuacgagaccucccggtt

SEQ ID NO: 513 - DNA, 19 bp, Artificial Sequence
  Description of Artificial Sequence:  Synthetic
  misc_feature (1)..(3): 2'-O-methyl
  misc_feature (5)..(5): 2'-O-methyl
  misc_feature (10)..(15): 2'-O-methyl
  misc_feature (1)..(17): ribonucleotide modified as described
  misc_feature (18)..(18): Phosphorothioate 3'-Internucleotide Linkage
ucuacgagaccucccggtt

SEQ ID NO: 514 - DNA, 18 bp, Artificial Sequence
  Description of Artificial Sequence:  Synthetic
  misc_feature (1)..(2): 2'-O-methyl
  misc_feature (4)..(4): 2'-O-methyl
  misc_feature (9)..(14): 2'-O-methyl
  misc_feature (1)..(16): ribonucleotide modified as described
  misc_feature (17)..(17): Phosphorothioate 3'-Internucleotide Linkage
cuacgagaccucccggtt

SEQ ID NO: 515 - DNA, 17 bp, Artificial Sequence
  Description of Artificial Sequence:  Synthetic
  misc_feature (1)..(1): 2'-O-methyl
  misc_feature (3)..(3): 2'-O-methyl
  misc_feature (8)..(13): 2'-O-methyl
  misc_feature (1)..(15): ribonucleotide modified as described
  misc_feature (16)..(16): Phosphorothioate 3'-Internucleotide Linkage
uacgagaccucccggtt

SEQ ID NO: 516 - DNA, 16 bp, Artificial Sequence
  Description of Artificial Sequence:  Synthetic
  misc_feature (2)..(2): 2'-O-methyl
  misc_feature (7)..(12): 2'-O-methyl
  misc_feature (1)..(14): ribonucleotide modified as described
  misc_feature (15)..(15): Phosphorothioate 3'-Internucleotide Linkage
acgagaccucccggtt

SEQ ID NO: 517 - DNA, 15 bp, Artificial Sequence
  Description of Artificial Sequence:  Synthetic
  misc_feature (1)..(1): 2'-O-methyl
  misc_feature (6)..(11): 2'-O-methyl
  misc_feature (1)..(13): ribonucleotide modified as described
  misc_feature (14)..(14): Phosphorothioate 3'-Internucleotide Linkage
cgagaccucccggtt

SEQ ID NO: 518 - RNA, 21 nt, Artificial Sequence
  Description of Artificial Sequence:  Synthetic
  misc_feature (3)..(5): 2'-O-methyl
  misc_feature (7)..(7): 2'-O-methyl
  misc_feature (12)..(17): 2'-O-methyl
  misc_feature (20)..(20): Phosphorothioate 3'-Internucleotide Linkage
ggucuacgagaccucccgggg

SEQ ID NO: 519 - RNA, 20 nt, Artificial Sequence
  Description of Artificial Sequence:  Synthetic
  misc_feature (3)..(5): 2'-O-methyl
  misc_feature (7)..(7): 2'-O-methyl
  misc_feature (12)..(17): 2'-O-methyl
  misc_feature (19)..(19): Phosphorothioate 3'-Internucleotide Linkage
ggucuacgagaccucccggg

SEQ ID NO: 520 - DNA, 20 bp, Artificial Sequence
  Description of Artificial Sequence:  Synthetic
  misc_feature (3)..(5): 2'-O-methyl
  misc_feature (7)..(7): 2'-O-methyl
  misc_feature (12)..(17): 2'-O-methyl
  misc_feature (19)..(19): Phosphorothioate 3'-Internucleotide Linkage
  misc_feature (1)..(19): ribonucleotide modified as described
ggucuacgagaccucccggt

SEQ ID NO: 521 - RNA, 19 nt, Artificial Sequence
  Description of Artificial Sequence:  Synthetic
  misc_feature (3)..(5): 2'-O-methyl
  misc_feature (7)..(7): 2'-O-methyl
  misc_feature (12)..(17): 2'-O-methyl
  misc_feature (18)..(18): Phosphorothioate 3'-Internucleotide Linkage
ggucuacgagaccucccgg

SEQ ID NO: 522 - RNA, 18 nt, Artificial Sequence
  Description of Artificial Sequence:  Synthetic
  misc_feature (3)..(5): 2'-O-methyl
  misc_feature (7)..(7): 2'-O-methyl
  misc_feature (12)..(17): 2'-O-methyl
  misc_feature (17)..(17): Phosphorothioate 3'-Internucleotide Linkage
ggucuacgagaccucccg

SEQ ID NO: 523 - RNA, 17 nt, Artificial Sequence
  Description of Artificial Sequence:  Synthetic
  misc_feature (3)..(5): 2'-O-methyl
  misc_feature (7)..(7): 2'-O-methyl
  misc_feature (12)..(17): 2'-O-methyl
  misc_feature (16)..(16): Phosphorothioate 3'-Internucleotide Linkage
ggucuacgagaccuccc

SEQ ID NO: 524 - RNA, 16 nt, Artificial Sequence
  Description of Artificial Sequence:  Synthetic
  misc_feature (3)..(5): 2'-O-methyl
  misc_feature (7)..(7): 2'-O-methyl
  misc_feature (12)..(16): 2'-O-methyl
  misc_feature (15)..(15): Phosphorothioate 3'-Internucleotide Linkage
ggucuacgagaccucc

SEQ ID NO: 525 - RNA, 15 nt, Artificial Sequence
  Description of Artificial Sequence:  Synthetic
  misc_feature (3)..(5): 2'-O-methyl
  misc_feature (7)..(7): 2'-O-methyl
  misc_feature (12)..(15): 2'-O-methyl
  misc_feature (14)..(14): Phosphorothioate 3'-Internucleotide Linkage
ggucuacgagaccuc

SEQ ID NO: 526 - DNA, 21 bp, Artificial Sequence
  Description of Artificial Sequence:  Synthetic
  misc_feature (1)..(2): 2'-O-methyl
  misc_feature (1)..(1): 5'-3 attached terminal deoxyabasic moiety
  misc_feature (9)..(12): 2'-O-methyl
  misc_feature (14)..(14): 2'-O-methyl
  misc_feature (18)..(19): 2'-O-methyl
  misc_feature (1)..(20): ribonucleotide modified as described
  misc_feature (21)..(21): 3'-3 attached terminal deoxyabasic moiety
ccgggaggucucguagaccgt

SEQ ID NO: 527 - DNA, 20 bp, Artificial Sequence
  Description of Artificial Sequence:  Synthetic
  misc_feature (1)..(1): 2'-O-methyl
  misc_feature (1)..(1): 5'-3 attached terminal deoxyabasic moiety
  misc_feature (8)..(11): 2'-O-methyl
  misc_feature (13)..(13): 2'-O-methyl
  misc_feature (17)..(18): 2'-O-methyl
  misc_feature (1)..(18): ribonucleotide modified as described
  misc_feature (20)..(20): 3'-3 attached terminal deoxyabasic moiety
cgggaggucucguagacctt

SEQ ID NO: 528 - DNA, 19 bp, Artificial Sequence
  Description of Artificial Sequence:  Synthetic
  misc_feature (1)..(1): 5'-3 attached terminal deoxyabasic moiety
  misc_feature (7)..(10): 2'-O-methyl
  misc_feature (12)..(12): 2'-O-methyl
  misc_feature (16)..(17): 2'-O-methyl
  misc_feature (1)..(17): ribonucleotide modified as described
  misc_feature (19)..(19): 3'-3 attached terminal deoxyabasic moiety
gggaggucucguagacctt

SEQ ID NO: 529 - DNA, 18 bp, Artificial Sequence
  Description of Artificial Sequence:  Synthetic
  misc_feature (1)..(1): 5'-3 attached terminal deoxyabasic moiety
  misc_feature (6)..(9): 2'-O-methyl
  misc_feature (11)..(11): 2'-O-methyl
  misc_feature (15)..(16): 2'-O-methyl
  misc_feature (1)..(16): ribonucleotide modified as described
  misc_feature (18)..(18): 3'-3 attached terminal deoxyabasic moiety
ggaggucucguagacctt

SEQ ID NO: 530 - DNA, 17 bp, Artificial Sequence
  Description of Artificial Sequence:  Synthetic
  misc_feature (1)..(1): 5'-3 attached terminal deoxyabasic moiety
  misc_feature (5)..(8): 2'-O-methyl
  misc_feature (10)..(10): 2'-O-methyl
  misc_feature (14)..(15): 2'-O-methyl
  misc_feature (1)..(15): ribonucleotide modified as described
  misc_feature (17)..(17): 3'-3 attached terminal deoxyabasic moiety
gaggucucguagacctt

SEQ ID NO: 531 - DNA, 16 bp, Artificial Sequence
  Description of Artificial Sequence:  Synthetic
  misc_feature (1)..(1): 5'-3 attached terminal deoxyabasic moiety
  misc_feature (4)..(7): 2'-O-methyl
  misc_feature (9)..(9): 2'-O-methyl
  misc_feature (13)..(14): 2'-O-methyl
  misc_feature (1)..(14): ribonucleotide modified as described
  misc_feature (16)..(16): 3'-3 attached terminal deoxyabasic moiety
aggucucguagacctt

SEQ ID NO: 532 - DNA, 20 bp, Artificial Sequence
  Description of Artificial Sequence:  Synthetic
  misc_feature (1)..(2): 2'-O-methyl
  misc_feature (1)..(1): 5'-3 attached terminal deoxyabasic moiety
  misc_feature (9)..(12): 2'-O-methyl
  misc_feature (14)..(14): 2'-O-methyl
  misc_feature (18)..(19): 2'-O-methyl
  misc_feature (1)..(19): ribonucleotide modified as described
  misc_feature (20)..(20): 3'-3 attached terminal deoxyabasic moiety
ccgggaggucucguagacct

SEQ ID NO: 533 - RNA, 19 nt, Artificial Sequence
  Description of Artificial Sequence:  Synthetic
  misc_feature (1)..(1): 5'-3 attached terminal deoxyabasic moiety
  misc_feature (1)..(2): 2'-O-methyl
  misc_feature (9)..(12): 2'-O-methyl
  misc_feature (14)..(14): 2'-O-methyl
  misc_feature (18)..(19): 2'-O-methyl
  misc_feature (19)..(19): 3'-3 attached terminal deoxyabasic moiety
ccgggaggucucguagacc

SEQ ID NO: 534 - RNA, 18 nt, Artificial Sequence
  Description of Artificial Sequence:  Synthetic
  misc_feature (1)..(1): 5'-3 attached terminal deoxyabasic moiety
  misc_feature (1)..(2): 2'-O-methyl
  misc_feature (9)..(12): 2'-O-methyl
  misc_feature (14)..(14): 2'-O-methyl
  misc_feature (18)..(18): 2'-O-methyl
  misc_feature (18)..(18): 3'-3 attached terminal deoxyabasic moiety
ccgggaggucucguagac

SEQ ID NO: 535 - RNA, 17 nt, Artificial Sequence
  Description of Artificial Sequence:  Synthetic
  misc_feature (1)..(1): 5'-3 attached terminal deoxyabasic moiety
  misc_feature (1)..(2): 2'-O-methyl
  misc_feature (9)..(12): 2'-O-methyl
  misc_feature (14)..(14): 2'-O-methyl
  misc_feature (17)..(17): 3'-3 attached terminal deoxyabasic moiety
ccgggaggucucguaga

SEQ ID NO: 536 - RNA, 16 nt, Artificial Sequence
  Description of Artificial Sequence:  Synthetic
  misc_feature (1)..(1): 5'-3 attached terminal deoxyabasic moiety
  misc_feature (1)..(2): 2'-O-methyl
  misc_feature (9)..(12): 2'-O-methyl
  misc_feature (14)..(14): 2'-O-methyl
  misc_feature (16)..(16): 3'-3 attached terminal deoxyabasic moiety
ccgggaggucucguag

SEQ ID NO: 537 - DNA, 21 bp, Artificial Sequence
  Description of Artificial Sequence:  Synthetic
  misc_feature (1)..(19): ribonucleotide modified as described
  misc_feature (1)..(1): 5'-3 attached terminal deoxyabasic moiety
  misc_feature (21)..(21): 3'-3 attached terminal deoxyabasic moiety
cugaguuuaaaaggcaccctt

SEQ ID NO: 538 - DNA, 21 bp, Artificial Sequence
  Description of Artificial Sequence:  Synthetic
  misc_feature (1)..(19): ribonucleotide modified as described
  misc_feature (20)..(20): Phosphorothioate 3'-Internucleotide Linkage
gggugccuuuuaaacucagtt

SEQ ID NO: 539 - DNA, 21 bp, Artificial Sequence
  Description of Artificial Sequence:  Synthetic
  misc_feature (1)..(19): ribonucleotide modified as described
  misc_feature (1)..(1): 5'-3 attached terminal deoxyabasic moiety
  misc_feature (21)..(21): 3'-3 attached terminal deoxyabasic moiety
cccacggaaaauuugaguctt

SEQ ID NO: 540 - DNA, 21 bp, Artificial Sequence
  Description of Artificial Sequence:  Synthetic
  misc_feature (1)..(19): ribonucleotide modified as described
  misc_feature (20)..(20): Phosphorothioate 3'-Internucleotide Linkage
gacucaaauuuuccgugggtt

SEQ ID NO: 541 - RNA, 21 nt, Artificial Sequence
  Description of Artificial Sequence:  Synthetic
aggugaagcgaagugcacauu

SEQ ID NO: 542 - DNA, 21 bp, Artificial Sequence
  Description of Artificial Sequence:  Synthetic
  misc_feature (1)..(1): 5'-3 attached terminal deoxyabasic moiety
  misc_feature (1)..(19): ribonucleotide modified as described
  misc_feature (21)..(21): 3'-3 attached terminal deoxyabasic moiety
uccacuucgcuucacgugutt

SEQ ID NO: 543 - DNA, 21 bp, Artificial Sequence
  Description of Artificial Sequence:  Synthetic
  misc_feature (1)..(19): ribonucleotide modified as described
  misc_feature (20)..(20): Phosphorothioate 3'-Internucleotide Linkage
acacgugaagcgaaguggatt

SEQ ID NO: 544 - DNA, 21 bp, Artificial Sequence
  Description of Artificial Sequence:  Synthetic
  misc_feature (1)..(1): 2'-deoxy
  misc_feature (1)..(1): 5'-3 attached terminal deoxyabasic moiety
  misc_feature (2)..(2): 2'-deoxy-2'-fluoro
  misc_feature (3)..(6): 2'-deoxy
  misc_feature (7)..(8): 2'-deoxy-2'-fluoro
  misc_feature (9)..(9): 2'-deoxy
  misc_feature (10)..(10): 2'-deoxy-2'-fluoro
  misc_feature (11)..(17): 2'-deoxy
  misc_feature (18)..(18): 2'-deoxy-2'-fluoro
  misc_feature (19)..(19): 2'-deoxy
  misc_feature (1)..(19): ribonucleotide modified as described
  misc_feature (21)..(21): 3'-3 attached terminal deoxyabasic moiety
auaaggcuaugaagagauatt

SEQ ID NO: 545 - DNA, 21 bp, Artificial Sequence
  Description of Artificial Sequence:  Synthetic
  misc_feature (1)..(1): 2'-deoxy-2'-fluoro
  misc_feature (2)..(2): 2'-O-methyl
  misc_feature (3)..(9): 2'-deoxy-2'-fluoro
  misc_feature (10)..(10): 2'-O-methyl
  misc_feature (11)..(11): 2'-deoxy-2'-fluoro
  misc_feature (12)..(13): 2'-O-methyl
  misc_feature (14)..(17): 2'-deoxy-2'-fluoro
  misc_feature (18)..(18): 2'-O-methyl
  misc_feature (19)..(19): 2'-deoxy-2'-fluoro
  misc_feature (1)..(19): ribonucleotide modified as described
  misc_feature (20)..(20): Phosphorothioate 3'-Internucleotide Linkage
uaucucuucauagccuuautt

SEQ ID NO: 546 - DNA, 21 bp, Artificial Sequence
  Description of Artificial Sequence:  Synthetic
  misc_feature (1)..(1): 2'-deoxy-2'-fluoro
  misc_feature (1)..(1): 5'-3 attached terminal deoxyabasic moiety
  misc_feature (2)..(2): 2'-deoxy
  misc_feature (3)..(3): 2'-deoxy-2'-fluoro
  misc_feature (4)..(4): 2'-deoxy
  misc_feature (5)..(5): 2'-deoxy-2'-fluoro
  misc_feature (6)..(6): 2'-deoxy
  misc_feature (7)..(7): 2'-deoxy-2'-fluoro
  misc_feature (8)..(9): 2'-deoxy
  misc_feature (10)..(10): 2'-deoxy-2'-fluoro
  misc_feature (11)..(15): 2'-deoxy
  misc_feature (16)..(19): 2'-deoxy-2'-fluoro
  misc_feature (1)..(19): ribonucleotide modified as described
  misc_feature (21)..(21): 3'-3 attached terminal deoxyabasic moiety
cguaugcagugaaaacucutt

SEQ ID NO: 547 - DNA, 21 bp, Artificial Sequence
  Description of Artificial Sequence:  Synthetic
  misc_feature (1)..(4): 2'-O-methyl
  misc_feature (5)..(9): 2'-deoxy-2'-fluoro
  misc_feature (10)..(10): 2'-O-methyl
  misc_feature (11)..(12): 2'-deoxy-2'-fluoro
  misc_feature (13)..(13): 2'-O-methyl
  misc_feature (14)..(14): 2'-deoxy-2'-fluoro
  misc_feature (15)..(15): 2'-O-methyl
  misc_feature (16)..(16): 2'-deoxy-2'-fluoro
  misc_feature (17)..(17): 2'-O-methyl
  misc_feature (18)..(18): 2'-deoxy-2'-fluoro
  misc_feature (19)..(19): 2'-O-methyl
  misc_feature (1)..(19): ribonucleotide modified as described
  misc_feature (20)..(20): Phosphorothioate 3'-Internucleotide Linkage
agaguuuucacugcauacgtt

SEQ ID NO: 548 - DNA, 21 bp, Artificial Sequence
  Description of Artificial Sequence:  Synthetic
  misc_feature (1)..(1): 2'-deoxy-2'-fluoro
  misc_feature (1)..(1): 5'-3 attached terminal deoxyabasic moiety
  misc_feature (2)..(3): 2'-deoxy
  misc_feature (4)..(4): 2'-deoxy-2'-fluoro
  misc_feature (5)..(15): 2'-deoxy
  misc_feature (16)..(17): 2'-deoxy-2'-fluoro
  misc_feature (18)..(18): 2'-deoxy
  misc_feature (19)..(19): 2'-deoxy-2'-fluoro
  misc_feature (1)..(19): ribonucleotide modified as described
  misc_feature (21)..(21): 3'-3 attached terminal deoxyabasic moiety
ugacggaaaaagagaucgutt

SEQ ID NO: 549 - DNA, 21 bp, Artificial Sequence
  Description of Artificial Sequence:  Synthetic
  misc_feature (1)..(1): 2'-O-methyl
  misc_feature (2)..(2): 2'-deoxy-2'-fluoro
  misc_feature (3)..(4): 2'-O-methyl
  misc_feature (5)..(15): 2'-deoxy-2'-fluoro
  misc_feature (16)..(16): 2'-O-methyl
  misc_feature (17)..(18): 2'-deoxy-2'-fluoro
  misc_feature (19)..(19): 2'-O-methyl
  misc_feature (1)..(19): ribonucleotide modified as described
  misc_feature (20)..(20): Phosphorothioate 3'-Internucleotide Linkage
acgaucucuuuuuccgucatt

SEQ ID NO: 550 - DNA, 21 bp, Artificial Sequence
  Description of Artificial Sequence:  Synthetic
  misc_feature (1)..(3): 2'-deoxy
  misc_feature (1)..(1): 5'-3 attached terminal deoxyabasic moiety
  misc_feature (4)..(5): 2'-deoxy-2'-fluoro
  misc_feature (6)..(6): 2'-deoxy
  misc_feature (7)..(7): 2'-deoxy-2'-fluoro
  misc_feature (8)..(8): 2'-deoxy
  misc_feature (9)..(11): 2'-deoxy-2'-fluoro
  misc_feature (12)..(12): 2'-deoxy
  misc_feature (13)..(13): 2'-deoxy-2'-fluoro
  misc_feature (14)..(16): 2'-deoxy
  misc_feature (17)..(17): 2'-deoxy-2'-fluoro
  misc_feature (18)..(19): 2'-deoxy
  misc_feature (1)..(19): ribonucleotide modified as described
  misc_feature (21)..(21): 3'-3 attached terminal deoxyabasic moiety
gaguuguguuuguggacgatt

SEQ ID NO: 551 - DNA, 21 bp, Artificial Sequence
  Description of Artificial Sequence:  Synthetic
  misc_feature (1)..(2): 2'-deoxy-2'-fluoro
  misc_feature (3)..(3): 2'-O-methyl
  misc_feature (4)..(6): 2'-deoxy-2'-fluoro
  misc_feature (7)..(7): 2'-O-methyl
  misc_feature (8)..(8): 2'-deoxy-2'-fluoro
  misc_feature (9)..(11): 2'-O-methyl
  misc_feature (12)..(12): 2'-deoxy-2'-fluoro
  misc_feature (13)..(13): 2'-O-methyl
  misc_feature (14)..(14): 2'-deoxy-2'-fluoro
  misc_feature (15)..(16): 2'-O-methyl
  misc_feature (17)..(19): 2'-deoxy-2'-fluoro
  misc_feature (1)..(19): ribonucleotide modified as described
  misc_feature (20)..(20): Phosphorothioate 3'-Internucleotide Linkage
ucguccacaaacacaacuctt

SEQ ID NO: 552 - DNA, 21 bp, Artificial Sequence
  Description of Artificial Sequence:  Synthetic
  misc_feature (1)..(6): 2'-deoxy
  misc_feature (1)..(1): 5'-3 attached terminal deoxyabasic moiety
  misc_feature (7)..(11): 2'-deoxy-2'-fluoro
  misc_feature (12)..(12): 2'-deoxy
  misc_feature (13)..(13): 2'-deoxy-2'-fluoro
  misc_feature (14)..(18): 2'-deoxy
  misc_feature (19)..(19): 2'-deoxy-2'-fluoro
  misc_feature (1)..(19): ribonucleotide modified as described
  misc_feature (21)..(21): 3'-3 attached terminal deoxyabasic moiety
gagagauccucauaaaggctt

SEQ ID NO: 553 - DNA, 21 bp, Artificial Sequence
  Description of Artificial Sequence:  Synthetic
  misc_feature (1)..(1): 2'-O-methyl
  misc_feature (2)..(6): 2'-deoxy-2'-fluoro
  misc_feature (7)..(7): 2'-O-methyl
  misc_feature (8)..(8): 2'-deoxy-2'-fluoro
  misc_feature (9)..(13): 2'-O-methyl
  misc_feature (14)..(19): 2'-deoxy-2'-fluoro
  misc_feature (1)..(19): ribonucleotide modified as described
  misc_feature (20)..(20): Phosphorothioate 3'-Internucleotide Linkage
gccuuuaugaggaucucuctt

SEQ ID NO: 554 - DNA, 21 bp, Artificial Sequence
  Description of Artificial Sequence:  Synthetic
  misc_feature (1)..(1): 2'-deoxy
  misc_feature (1)..(1): 5'-3 attached terminal deoxyabasic moiety
  misc_feature (2)..(2): 2'-deoxy-2'-fluoro
  misc_feature (3)..(8): 2'-deoxy
  misc_feature (9)..(12): 2'-deoxy-2'-fluoro
  misc_feature (13)..(13): 2'-deoxy
  misc_feature (14)..(14): 2'-deoxy-2'-fluoro
  misc_feature (15)..(16): 2'-deoxy
  misc_feature (17)..(17): 2'-deoxy-2'-fluoro
  misc_feature (18)..(18): 2'-deoxy
  misc_feature (19)..(19): 2'-deoxy-2'-fluoro
  misc_feature (1)..(19): ribonucleotide modified as described
  misc_feature (21)..(21): 3'-3 attached terminal deoxyabasic moiety
gcgaaaggccuugugguactt

SEQ ID NO: 555 - DNA, 21 bp, Artificial Sequence
  Description of Artificial Sequence:  Synthetic
  misc_feature (1)..(1): 2'-O-methyl
  misc_feature (2)..(2): 2'-deoxy-2'-fluoro
  misc_feature (3)..(3): 2'-O-methyl
  misc_feature (4)..(5): 2'-deoxy-2'-fluoro
  misc_feature (6)..(6): 2'-O-methyl
  misc_feature (7)..(7): 2'-deoxy-2'-fluoro
  misc_feature (8)..(11): 2'-O-methyl
  misc_feature (12)..(17): 2'-deoxy-2'-fluoro
  misc_feature (18)..(18): 2'-O-methyl
  misc_feature (19)..(19): 2'-deoxy-2'-fluoro
  misc_feature (1)..(19): ribonucleotide modified as described
  misc_feature (20)..(20): Phosphorothioate 3'-Internucleotide Linkage
guaccacaaggccuuucgctt

SEQ ID NO: 556 - DNA, 21 bp, Artificial Sequence
  Description of Artificial Sequence:  Synthetic
  misc_feature (1)..(1): 2'-deoxy-2'-fluoro
  misc_feature (1)..(1): 5'-3 attached terminal deoxyabasic moiety
  misc_feature (2)..(7): 2'-deoxy
  misc_feature (8)..(11): 2'-deoxy-2'-fluoro
  misc_feature (12)..(12): 2'-deoxy
  misc_feature (13)..(13): 2'-deoxy-2'-fluoro
  misc_feature (14)..(15): 2'-deoxy
  misc_feature (16)..(16): 2'-deoxy-2'-fluoro
  misc_feature (17)..(17): 2'-deoxy
  misc_feature (18)..(19): 2'-deoxy-2'-fluoro
  misc_feature (1)..(19): ribonucleotide modified as described
  misc_feature (21)..(21): 3'-3 attached terminal deoxyabasic moiety
cgaaaggccuugugguacutt

SEQ ID NO: 557 - DNA, 21 bp, Artificial Sequence
  Description of Artificial Sequence:  Synthetic
  misc_feature (1)..(2): 2'-O-methyl
  misc_feature (3)..(3): 2'-deoxy-2'-fluoro
  misc_feature (4)..(4): 2'-O-methyl
  misc_feature (5)..(6): 2'-deoxy-2'-fluoro
  misc_feature (7)..(7): 2'-O-methyl
  misc_feature (8)..(8): 2'-deoxy-2'-fluoro
  misc_feature (9)..(12): 2'-O-methyl
  misc_feature (13)..(18): 2'-deoxy-2'-fluoro
  misc_feature (19)..(19): 2'-O-methyl
  misc_feature (1)..(19): ribonucleotide modified as described
  misc_feature (20)..(20): Phosphorothioate 3'-Internucleotide Linkage
aguaccacaaggccuuucgtt

SEQ ID NO: 558 - DNA, 21 bp, Artificial Sequence
  Description of Artificial Sequence:  Synthetic
  misc_feature (1)..(1): 2'-deoxy
  misc_feature (1)..(1): 5'-3 attached terminal deoxyabasic moiety
  misc_feature (2)..(5): 2'-deoxy-2'-fluoro
  misc_feature (6)..(6): 2'-deoxy
  misc_feature (7)..(7): 2'-deoxy-2'-fluoro
  misc_feature (8)..(9): 2'-deoxy
  misc_feature (10)..(10): 2'-deoxy-2'-fluoro
  misc_feature (11)..(11): 2'-deoxy
  misc_feature (12)..(13): 2'-deoxy-2'-fluoro
  misc_feature (14)..(14): 2'-deoxy
  misc_feature (15)..(17): 2'-deoxy-2'-fluoro
  misc_feature (18)..(19): 2'-deoxy
  misc_feature (1)..(19): ribonucleotide modified as described
  misc_feature (21)..(21): 3'-3 attached terminal deoxyabasic moiety
gccuugugguacugccugatt

SEQ ID NO: 559 - DNA, 21 bp, Artificial Sequence
  Description of Artificial Sequence:  Synthetic
  misc_feature (1)..(2): 2'-deoxy-2'-fluoro
  misc_feature (3)..(5): 2'-O-methyl
  misc_feature (6)..(6): 2'-deoxy-2'-fluoro
  misc_feature (7)..(8): 2'-O-methyl
  misc_feature (9)..(9): 2'-deoxy-2'-fluoro
  misc_feature (10)..(10): 2'-O-methyl
  misc_feature (11)..(12): 2'-deoxy-2'-fluoro
  misc_feature (13)..(13): 2'-O-methyl
  misc_feature (14)..(14): 2'-deoxy-2'-fluoro
  misc_feature (15)..(18): 2'-O-methyl
  misc_feature (19)..(19): 2'-deoxy-2'-fluoro
  misc_feature (1)..(19): ribonucleotide modified as described
  misc_feature (20)..(20): Phosphorothioate 3'-Internucleotide Linkage
ucaggcaguaccacaaggctt

SEQ ID NO: 560 - DNA, 21 bp, Artificial Sequence
  Description of Artificial Sequence:  Synthetic
  misc_feature (1)..(2): 2'-deoxy-2'-fluoro
  misc_feature (1)..(1): 5'-3 attached terminal deoxyabasic moiety
  misc_feature (3)..(4): 2'-deoxy
  misc_feature (5)..(5): 2'-deoxy-2'-fluoro
  misc_feature (6)..(9): 2'-deoxy
  misc_feature (10)..(10): 2'-deoxy-2'-fluoro
  misc_feature (11)..(11): 2'-deoxy
  misc_feature (12)..(14): 2'-deoxy-2'-fluoro
  misc_feature (15)..(15): 2'-deoxy
  misc_feature (16)..(16): 2'-deoxy-2'-fluoro
  misc_feature (17)..(19): 2'-deoxy
  misc_feature (1)..(19): ribonucleotide modified as described
  misc_feature (21)..(21): 3'-3 attached terminal deoxyabasic moiety
cugauagggugcuugcgagtt

SEQ ID NO: 561 - DNA, 21 bp, Artificial Sequence
  Description of Artificial Sequence:  Synthetic
  misc_feature (1)..(2): 2'-O-methyl
  misc_feature (3)..(3): 2'-deoxy-2'-fluoro
  misc_feature (4)..(5): 2'-O-methyl
  misc_feature (6)..(6): 2'-deoxy-2'-fluoro
  misc_feature (7)..(7): 2'-O-methyl
  misc_feature (8)..(9): 2'-deoxy-2'-fluoro
  misc_feature (10)..(10): 2'-O-methyl
  misc_feature (11)..(11): 2'-deoxy-2'-fluoro
  misc_feature (12)..(15): 2'-O-methyl
  misc_feature (16)..(19): 2'-deoxy-2'-fluoro
  misc_feature (1)..(19): ribonucleotide modified as described
  misc_feature (20)..(20): Phosphorothioate 3'-Internucleotide Linkage
ggcaguaccacaaggccuutt

SEQ ID NO: 562 - DNA, 21 bp, Artificial Sequence
  Description of Artificial Sequence:  Synthetic
  misc_feature (1)..(1): 2'-deoxy-2'-fluoro
  misc_feature (1)..(1): 5'-3 attached terminal deoxyabasic moiety
  misc_feature (2)..(3): 2'-deoxy
  misc_feature (4)..(4): 2'-deoxy-2'-fluoro
  misc_feature (5)..(10): 2'-deoxy
  misc_feature (11)..(13): 2'-deoxy-2'-fluoro
  misc_feature (14)..(14): 2'-deoxy
  misc_feature (15)..(15): 2'-deoxy-2'-fluoro
  misc_feature (16)..(18): 2'-deoxy
  misc_feature (19)..(19): 2'-deoxy-2'-fluoro
  misc_feature (1)..(19): ribonucleotide modified as described
  misc_feature (21)..(21): 3'-3 attached terminal deoxyabasic moiety
ugauagggugcuugcgagutt

SEQ ID NO: 563 - DNA, 21 bp, Artificial Sequence
  Description of Artificial Sequence:  Synthetic
  misc_feature (1)..(1): 2'-O-methyl
  misc_feature (2)..(4): 2'-deoxy-2'-fluoro
  misc_feature (5)..(5): 2'-O-methyl
  misc_feature (6)..(6): 2'-deoxy-2'-fluoro
  misc_feature (7)..(9): 2'-O-methyl
  misc_feature (10)..(10): 2'-deoxy-2'-fluoro
  misc_feature (11)..(11): 2'-O-methyl
  misc_feature (12)..(15): 2'-deoxy-2'-fluoro
  misc_feature (16)..(16): 2'-O-methyl
  misc_feature (17)..(18): 2'-deoxy-2'-fluoro
  misc_feature (19)..(19): 2'-O-methyl
  misc_feature (1)..(19): ribonucleotide modified as described
  misc_feature (20)..(20): Phosphorothioate 3'-Internucleotide Linkage
acucgcaagcacccuaucatt

SEQ ID NO: 564 - DNA, 21 bp, Artificial Sequence
  Description of Artificial Sequence:  Synthetic
  misc_feature (1)..(1): 2'-deoxy
  misc_feature (1)..(1): 5'-3 attached terminal deoxyabasic moiety
  misc_feature (2)..(2): 2'-deoxy-2'-fluoro
  misc_feature (3)..(6): 2'-deoxy
  misc_feature (7)..(7): 2'-deoxy-2'-fluoro
  misc_feature (8)..(8): 2'-deoxy
  misc_feature (9)..(11): 2'-deoxy-2'-fluoro
  misc_feature (12)..(12): 2'-deoxy
  misc_feature (13)..(13): 2'-deoxy-2'-fluoro
  misc_feature (14)..(16): 2'-deoxy
  misc_feature (17)..(17): 2'-deoxy-2'-fluoro
  misc_feature (18)..(18): 2'-deoxy
  misc_feature (19)..(19): 2'-deoxy-2'-fluoro
  misc_feature (1)..(19): ribonucleotide modified as described
  misc_feature (21)..(21): 3'-3 attached terminal deoxyabasic moiety
auagggugcuugcgagugctt

SEQ ID NO: 565 - DNA, 21 bp, Artificial Sequence
  Description of Artificial Sequence:  Synthetic
  misc_feature (1)..(1): 2'-O-methyl
  misc_feature (2)..(2): 2'-deoxy-2'-fluoro
  misc_feature (3)..(3): 2'-O-methyl
  misc_feature (4)..(6): 2'-deoxy-2'-fluoro
  misc_feature (7)..(7): 2'-O-methyl
  misc_feature (8)..(8): 2'-deoxy-2'-fluoro
  misc_feature (9)..(11): 2'-O-methyl
  misc_feature (12)..(12): 2'-deoxy-2'-fluoro
  misc_feature (13)..(13): 2'-O-methyl
  misc_feature (14)..(17): 2'-deoxy-2'-fluoro
  misc_feature (18)..(18): 2'-O-methyl
  misc_feature (19)..(19): 2'-deoxy-2'-fluoro
  misc_feature (1)..(19): ribonucleotide modified as described
  misc_feature (20)..(20): Phosphorothioate 3'-Internucleotide Linkage
gcacucgcaagcacccuautt

SEQ ID NO: 566 - DNA, 21 bp, Artificial Sequence
  Description of Artificial Sequence:  Synthetic
  misc_feature (1)..(1): 2'-deoxy-2'-fluoro
  misc_feature (1)..(1): 5'-3 attached terminal deoxyabasic moiety
  misc_feature (2)..(2): 2'-deoxy
  misc_feature (3)..(3): 2'-deoxy-2'-fluoro
  misc_feature (4)..(6): 2'-deoxy
  misc_feature (7)..(7): 2'-deoxy-2'-fluoro
  misc_feature (8)..(8): 2'-deoxy
  misc_feature (9)..(12): 2'-deoxy-2'-fluoro
  misc_feature (13)..(18): 2'-deoxy
  misc_feature (19)..(19): 2'-deoxy-2'-fluoro
  misc_feature (1)..(19): ribonucleotide modified as described
  misc_feature (21)..(21): 3'-3 attached terminal deoxyabasic moiety
ugcgagugccccgggaggutt

SEQ ID NO: 567 - DNA, 21 bp, Artificial Sequence
  Description of Artificial Sequence:  Synthetic
  misc_feature (1)..(3): 2'-O-methyl
  misc_feature (4)..(4): 2'-deoxy-2'-fluoro
  misc_feature (5)..(5): 2'-O-methyl
  misc_feature (6)..(9): 2'-deoxy-2'-fluoro
  misc_feature (10)..(10): 2'-O-methyl
  misc_feature (11)..(12): 2'-deoxy-2'-fluoro
  misc_feature (13)..(15): 2'-O-methyl
  misc_feature (16)..(16): 2'-deoxy-2'-fluoro
  misc_feature (17)..(18): 2'-O-methyl
  misc_feature (19)..(19): 2'-deoxy-2'-fluoro
  misc_feature (1)..(19): ribonucleotide modified as described
  misc_feature (20)..(20): Phosphorothioate 3'-Internucleotide Linkage
aagcacccuaucaggcagutt

SEQ ID NO: 568 - DNA, 21 bp, Artificial Sequence
  Description of Artificial Sequence:  Synthetic
  misc_feature (1)..(1): 2'-deoxy
  misc_feature (1)..(1): 5'-3 attached terminal deoxyabasic moiety
  misc_feature (2)..(2): 2'-deoxy-2'-fluoro
  misc_feature (3)..(4): 2'-deoxy
  misc_feature (5)..(5): 2'-deoxy-2'-fluoro
  misc_feature (6)..(8): 2'-deoxy
  misc_feature (9)..(16): 2'-deoxy-2'-fluoro
  misc_feature (17)..(18): 2'-deoxy
  misc_feature (19)..(19): 2'-deoxy-2'-fluoro
  misc_feature (1)..(19): ribonucleotide modified as described
  misc_feature (21)..(21): 3'-3 attached terminal deoxyabasic moiety
gugguggacuucucucaautt

SEQ ID NO: 569 - DNA, 21 bp, Artificial Sequence
  Description of Artificial Sequence:  Synthetic
  misc_feature (1)..(1): 2'-O-methyl
  misc_feature (2)..(3): 2'-deoxy-2'-fluoro
  misc_feature (4)..(11): 2'-O-methyl
  misc_feature (12)..(14): 2'-deoxy-2'-fluoro
  misc_feature (15)..(15): 2'-O-methyl
  misc_feature (16)..(17): 2'-deoxy-2'-fluoro
  misc_feature (18)..(18): 2'-O-methyl
  misc_feature (19)..(19): 2'-deoxy-2'-fluoro
  misc_feature (1)..(19): ribonucleotide modified as described
  misc_feature (20)..(20): Phosphorothioate 3'-Internucleotide Linkage
auugagagaaguccaccactt

SEQ ID NO: 570 - DNA, 21 bp, Artificial Sequence
  Description of Artificial Sequence:  Synthetic
  misc_feature (1)..(2): 2'-deoxy
  misc_feature (1)..(1): 5'-3 attached terminal deoxyabasic moiety
  misc_feature (3)..(3): 2'-deoxy-2'-fluoro
  misc_feature (4)..(6): 2'-deoxy
  misc_feature (7)..(14): 2'-deoxy-2'-fluoro
  misc_feature (15)..(16): 2'-deoxy
  misc_feature (17)..(19): 2'-deoxy-2'-fluoro
  misc_feature (1)..(19): ribonucleotide modified as described
  misc_feature (21)..(21): 3'-3 attached terminal deoxyabasic moiety
gguggacuucucucaauuutt

SEQ ID NO: 571 - DNA, 21 bp, Artificial Sequence
  Description of Artificial Sequence:  Synthetic
  misc_feature (1)..(3): 2'-O-methyl
  misc_feature (4)..(5): 2'-deoxy-2'-fluoro
  misc_feature (6)..(13): 2'-O-methyl
  misc_feature (14)..(16): 2'-deoxy-2'-fluoro
  misc_feature (17)..(17): 2'-O-methyl
  misc_feature (18)..(19): 2'-deoxy-2'-fluoro
  misc_feature (1)..(19): ribonucleotide modified as described
  misc_feature (20)..(20): Phosphorothioate 3'-Internucleotide Linkage
aaauugagagaaguccacctt

SEQ ID NO: 572 - DNA, 21 bp, Artificial Sequence
  Description of Artificial Sequence:  Synthetic
  misc_feature (1)..(3): 2'-deoxy
  misc_feature (1)..(1): 5'-3 attached terminal deoxyabasic moiety
  misc_feature (4)..(11): 2'-deoxy-2'-fluoro
  misc_feature (12)..(13): 2'-deoxy
  misc_feature (14)..(19): 2'-deoxy-2'-fluoro
  misc_feature (1)..(19): ribonucleotide modified as described
  misc_feature (21)..(21): 3'-3 attached terminal deoxyabasic moiety
ggacuucucucaauuuucutt

SEQ ID NO: 573 - DNA, 21 bp, Artificial Sequence
  Description of Artificial Sequence:  Synthetic
  misc_feature (1)..(6): 2'-O-methyl
  misc_feature (7)..(8): 2'-deoxy-2'-fluoro
  misc_feature (9)..(16): 2'-O-methyl
  misc_feature (17)..(19): 2'-deoxy-2'-fluoro
  misc_feature (1)..(19): ribonucleotide modified as described
  misc_feature (20)..(20): Phosphorothioate 3'-Internucleotide Linkage
agaaaauugagagaagucctt

SEQ ID NO: 574 - DNA, 21 bp, Artificial Sequence
  Description of Artificial Sequence:  Synthetic
  misc_feature (1)..(1): 2'-deoxy
  misc_feature (1)..(1): 5'-3 attached terminal deoxyabasic moiety
  misc_feature (2)..(2): 2'-deoxy-2'-fluoro
  misc_feature (3)..(3): 2'-deoxy
  misc_feature (4)..(7): 2'-deoxy-2'-fluoro
  misc_feature (8)..(8): 2'-deoxy
  misc_feature (9)..(12): 2'-deoxy-2'-fluoro
  misc_feature (13)..(13): 2'-deoxy
  misc_feature (14)..(18): 2'-deoxy-2'-fluoro
  misc_feature (19)..(19): 2'-deoxy
  misc_feature (1)..(19): ribonucleotide modified as described
  misc_feature (21)..(21): 3'-3 attached terminal deoxyabasic moiety
gcacuucgcuucaccucugtt

SEQ ID NO: 575 - DNA, 21 bp, Artificial Sequence
  Description of Artificial Sequence:  Synthetic
  misc_feature (1)..(1): 2'-deoxy-2'-fluoro
  misc_feature (2)..(6): 2'-O-methyl
  misc_feature (7)..(7): 2'-deoxy-2'-fluoro
  misc_feature (8)..(11): 2'-O-methyl
  misc_feature (12)..(12): 2'-deoxy-2'-fluoro
  misc_feature (13)..(16): 2'-O-methyl
  misc_feature (17)..(17): 2'-deoxy-2'-fluoro
  misc_feature (18)..(18): 2'-O-methyl
  misc_feature (19)..(19): 2'-deoxy-2'-fluoro
  misc_feature (1)..(19): ribonucleotide modified as described
  misc_feature (20)..(20): Phosphorothioate 3'-Internucleotide Linkage
cagaggugaagcgaagugctt

SEQ ID NO: 576 - DNA, 21 bp, Artificial Sequence
  Description of Artificial Sequence:  Synthetic
  misc_feature (1)..(1): 2'-deoxy
  misc_feature (1)..(1): 5'-3 attached terminal deoxyabasic moiety
  misc_feature (2)..(5): 2'-deoxy-2'-fluoro
  misc_feature (6)..(6): 2'-deoxy
  misc_feature (7)..(10): 2'-deoxy-2'-fluoro
  misc_feature (11)..(11): 2'-deoxy
  misc_feature (12)..(16): 2'-deoxy-2'-fluoro
  misc_feature (17)..(17): 2'-deoxy
  misc_feature (18)..(18): 2'-deoxy-2'-fluoro
  misc_feature (19)..(19): 2'-deoxy
  misc_feature (1)..(19): ribonucleotide modified as described
  misc_feature (21)..(21): 3'-3 attached terminal deoxyabasic moiety
acuucgcuucaccucugcatt

SEQ ID NO: 577 - DNA, 21 bp, Artificial Sequence
  Description of Artificial Sequence:  Synthetic
  misc_feature (1)..(1): 2'-deoxy-2'-fluoro
  misc_feature (2)..(2): 2'-O-methyl
  misc_feature (3)..(3): 2'-deoxy-2'-fluoro
  misc_feature (4)..(8): 2'-O-methyl
  misc_feature (9)..(9): 2'-deoxy-2'-fluoro
  misc_feature (10)..(13): 2'-O-methyl
  misc_feature (14)..(14): 2'-deoxy-2'-fluoro
  misc_feature (15)..(18): 2'-O-methyl
  misc_feature (19)..(19): 2'-deoxy-2'-fluoro
  misc_feature (1)..(19): ribonucleotide modified as described
  misc_feature (20)..(20): Phosphorothioate 3'-Internucleotide Linkage
ugcagaggugaagcgaagutt

SEQ ID NO: 578 - DNA, 21 bp, Artificial Sequence
  Description of Artificial Sequence:  Synthetic
  misc_feature (1)..(1): 2'-O-methyl
  misc_feature (1)..(1): 5'-3 attached terminal deoxyabasic moiety
  misc_feature (3)..(3): 2'-O-methyl
  misc_feature (5)..(5): 2'-O-methyl
  misc_feature (7)..(10): 2'-O-methyl
  misc_feature (12)..(15): 2'-O-methyl
  misc_feature (17)..(19): 2'-O-methyl
  misc_feature (1)..(19): ribonucleotide modified as described
  misc_feature (21)..(21): 3'-3 attached terminal deoxyabasic moiety
ugugcacuucgcuucaccutt

SEQ ID NO: 579 - DNA, 21 bp, Artificial Sequence
  Description of Artificial Sequence:  Synthetic
  misc_feature (1)..(3): 2'-O-methyl
  misc_feature (1)..(1): 5'-3 attached terminal deoxyabasic moiety
  misc_feature (5)..(8): 2'-O-methyl
  misc_feature (10)..(13): 2'-O-methyl
  misc_feature (15)..(15): 2'-O-methyl
  misc_feature (17)..(17): 2'-O-methyl
  misc_feature (19)..(19): 2'-O-methyl
  misc_feature (1)..(19): ribonucleotide modified as described
  misc_feature (21)..(21): 3'-3 attached terminal deoxyabasic moiety
uccacuucgcuucacgugutt

SEQ ID NO: 580 - DNA, 21 bp, Artificial Sequence
  Description of Artificial Sequence:  Synthetic
  misc_feature (1)..(1): 5'-3 attached terminal deoxyabasic moiety
  misc_feature (2)..(2): 2'-O-methyl
  misc_feature (4)..(4): 2'-O-methyl
  misc_feature (6)..(6): 2'-O-methyl
  misc_feature (11)..(11): 2'-O-methyl
  misc_feature (16)..(16): 2'-O-methyl
  misc_feature (1)..(19): ribonucleotide modified as described
  misc_feature (21)..(21): 3'-3 attached terminal deoxyabasic moiety
ugugcacuucgcuucaccutt

SEQ ID NO: 581 - DNA, 21 bp, Artificial Sequence
  Description of Artificial Sequence:  Synthetic
  misc_feature (1)..(1): 5'-3 attached terminal deoxyabasic moiety
  misc_feature (4)..(4): 2'-O-methyl
  misc_feature (9)..(9): 2'-O-methyl
  misc_feature (14)..(14): 2'-O-methyl
  misc_feature (16)..(16): 2'-O-methyl
  misc_feature (18)..(18): 2'-O-methyl
  misc_feature (1)..(19): ribonucleotide modified as described
  misc_feature (21)..(21): 3'-3 attached terminal deoxyabasic moiety
uccacuucgcuucacgugutt

SEQ ID NO: 582 - DNA, 21 bp, Artificial Sequence
  Description of Artificial Sequence:  Synthetic
  misc_feature (1)..(1): 2'-deoxy-2'-fluoro
  misc_feature (1)..(1): 5'-3 attached terminal deoxyabasic moiety
  misc_feature (2)..(2): 2'-O-methyl
  misc_feature (3)..(3): 2'-deoxy-2'-fluoro
  misc_feature (4)..(4): 2'-O-methyl
  misc_feature (5)..(5): 2'-deoxy-2'-fluoro
  misc_feature (6)..(6): 2'-O-methyl
  misc_feature (7)..(10): 2'-deoxy-2'-fluoro
  misc_feature (11)..(11): 2'-O-methyl
  misc_feature (12)..(15): 2'-deoxy-2'-fluoro
  misc_feature (16)..(16): 2'-O-methyl
  misc_feature (17)..(19): 2'-deoxy-2'-fluoro
  misc_feature (1)..(19): ribonucleotide modified as described
  misc_feature (21)..(21): 3'-3 attached terminal deoxyabasic moiety
ugugcacuucgcuucaccutt

SEQ ID NO: 583 - DNA, 21 bp, Artificial Sequence
  Description of Artificial Sequence:  Synthetic
  misc_feature (1)..(3): 2'-deoxy-2'-fluoro
  misc_feature (1)..(1): 5'-3 attached terminal deoxyabasic moiety
  misc_feature (4)..(4): 2'-O-methyl
  misc_feature (5)..(8): 2'-deoxy-2'-fluoro
  misc_feature (9)..(9): 2'-O-methyl
  misc_feature (10)..(13): 2'-deoxy-2'-fluoro
  misc_feature (14)..(14): 2'-O-methyl
  misc_feature (15)..(15): 2'-deoxy-2'-fluoro
  misc_feature (16)..(16): 2'-O-methyl
  misc_feature (17)..(17): 2'-deoxy-2'-fluoro
  misc_feature (18)..(18): 2'-O-methyl
  misc_feature (19)..(19): 2'-deoxy-2'-fluoro
  misc_feature (1)..(19): ribonucleotide modified as described
  misc_feature (21)..(21): 3'-3 attached terminal deoxyabasic moiety
uccacuucgcuucacgugutt

SEQ ID NO: 584 - DNA, 20 bp, Artificial Sequence
  Description of Artificial Sequence:  Synthetic
  misc_feature (4)..(4): 2'-deoxy-2'-Fluoro
  misc_feature (9)..(9): 2'-deoxy-2'-Fluoro
  misc_feature (14)..(14): 2'-deoxy-2'-Fluoro
  misc_feature (16)..(16): 2'-deoxy-2'-Fluoro
  misc_feature (18)..(18): 2'-deoxy-2'-Fluoro
  misc_feature (19)..(19): Phosphorothioate 3'-Internucleotide Linkage
  misc_feature (1)..(18): ribonucleotide modified as described
aggugaagcgaagugcactt

SEQ ID NO: 585 - DNA, 20 bp, Artificial Sequence
  Description of Artificial Sequence:  Synthetic
  misc_feature (2)..(2): 2'-deoxy-2'-Fluoro
  misc_feature (4)..(4): 2'-deoxy-2'-Fluoro
  misc_feature (6)..(9): 2'-deoxy-2'-Fluoro
  misc_feature (11)..(14): 2'-deoxy-2'-Fluoro
  misc_feature (16)..(18): 2'-deoxy-2'-Fluoro
  misc_feature (1)..(18): ribonucleotide modified as described
gugcacuucgcuucaccutt

SEQ ID NO: 586 - RNA, 18 nt, Artificial Sequence
  Description of Artificial Sequence:  Synthetic
  misc_feature (1)..(1): 5'-phosphate
  misc_feature (19)..(19): 3'-3 attached terminal deoxyabasic moiety
cacgagucuagacucgug

SEQ ID NO: 587 - DNA, 19 bp, Artificial Sequence
  Description of Artificial Sequence:  Synthetic
  misc_feature (1)..(17): ribonucleotide modified as described
  misc_feature (19)..(19): 3'-3 attached terminal deoxyabasic moiety
gaguuuaaaaggcaccctt

SEQ ID NO: 588 - DNA, 18 bp, Artificial Sequence
  Description of Artificial Sequence:  Synthetic
  misc_feature (1)..(16): ribonucleotide modified as described
  misc_feature (18)..(18): 3'-3 attached terminal deoxyabasic moiety
aguuuaaaaggcaccctt

SEQ ID NO: 589 - DNA, 17 bp, Artificial Sequence
  Description of Artificial Sequence:  Synthetic
  misc_feature (1)..(15): ribonucleotide modified as described
  misc_feature (17)..(17): 3'-3 attached terminal deoxyabasic moiety
guuuaaaaggcaccctt

SEQ ID NO: 590 - DNA, 15 bp, Artificial Sequence
  Description of Artificial Sequence:  Synthetic
  misc_feature (1)..(13): ribonucleotide modified as described
  misc_feature (15)..(15): 3'-3 attached terminal deoxyabasic moiety
uuaaaaggcaccctt

SEQ ID NO: 591 - DNA, 13 bp, Artificial Sequence
  Description of Artificial Sequence:  Synthetic
  misc_feature (1)..(11): ribonucleotide modified as described
  misc_feature (13)..(13): 3'-3 attached terminal deoxyabasic moiety
aaaaggcaccctt

SEQ ID NO: 592 - RNA, 19 nt, Artificial Sequence
  Description of Artificial Sequence:  Synthetic
  misc_feature (1)..(1): 5'-3 attached terminal deoxyabasic moiety
cugaguuuaaaaggcaccc

SEQ ID NO: 593 - RNA, 18 nt, Artificial Sequence
  Description of Artificial Sequence:  Synthetic
  misc_feature (1)..(1): 5'-3 attached terminal deoxyabasic moiety
cugaguuuaaaaggcacc

SEQ ID NO: 594 - RNA, 17 nt, Artificial Sequence
  Description of Artificial Sequence:  Synthetic
  misc_feature (1)..(1): 5'-3 attached terminal deoxyabasic moiety
cugaguuuaaaaggcac

SEQ ID NO: 595 - RNA, 15 nt, Artificial Sequence
  Description of Artificial Sequence:  Synthetic
  misc_feature (1)..(1): 5'-3 attached terminal deoxyabasic moiety
cugaguuuaaaaggc

SEQ ID NO: 596 - DNA, 20 bp, Artificial Sequence
  Description of Artificial Sequence:  Synthetic
  misc_feature (19)..(19): Phosphorothioate 3'-Internucleotide Linkage
  misc_feature (1)..(18): ribonucleotide modified as described
ggugccuuuuaaacucagtt

SEQ ID NO: 597 - DNA, 19 bp, Artificial Sequence
  Description of Artificial Sequence:  Synthetic
  misc_feature (18)..(18): Phosphorothioate 3'-Internucleotide Linkage
  misc_feature (1)..(17): ribonucleotide modified as described
gugccuuuuaaacucagtt

SEQ ID NO: 598 - DNA, 18 bp, Artificial Sequence
  Description of Artificial Sequence:  Synthetic
  misc_feature (17)..(17): Phosphorothioate 3'-Internucleotide Linkage
  misc_feature (1)..(16): ribonucleotide modified as described
ugccuuuuaaacucagtt

SEQ ID NO: 599 - DNA, 17 bp, Artificial Sequence
  Description of Artificial Sequence:  Synthetic
  misc_feature (16)..(16): Phosphorothioate 3'-Internucleotide Linkage
  misc_feature (1)..(15): ribonucleotide modified as described
gccuuuuaaacucagtt

SEQ ID NO: 600 - DNA, 16 bp, Artificial Sequence
  Description of Artificial Sequence:  Synthetic
  misc_feature (15)..(15): Phosphorothioate 3'-Internucleotide Linkage
  misc_feature (1)..(14): ribonucleotide modified as described
ccuuuuaaacucagtt

SEQ ID NO: 601 - DNA, 20 bp, Artificial Sequence
  Description of Artificial Sequence:  Synthetic
  misc_feature (1)..(19): ribonucleotide modified as described
gggugccuuuuaaacucagt

SEQ ID NO: 602 - RNA, 19 nt, Artificial Sequence
  Description of Artificial Sequence:  Synthetic
gggugccuuuuaaacucag

SEQ ID NO: 603 - RNA, 18 nt, Artificial Sequence
  Description of Artificial Sequence:  Synthetic
gggugccuuuuaaacuca

SEQ ID NO: 604 - RNA, 17 nt, Artificial Sequence
  Description of Artificial Sequence:  Synthetic
gggugccuuuuaaacuc

SEQ ID NO: 605 - RNA, 16 nt, Artificial Sequence
  Description of Artificial Sequence:  Synthetic
gggugccuuuuaaacu

SEQ ID NO: 606 - RNA, 14 nt, Artificial Sequence
  Description of Artificial Sequence:  Synthetic
gggugccuuuuaaa

SEQ ID NO: 607 - RNA, 12 nt, Artificial Sequence
  Description of Artificial Sequence:  Synthetic
gggugccuuuua

SEQ ID NO: 608 - RNA, 19 nt, Artificial Sequence
  Description of Artificial Sequence:  Synthetic
  misc_feature (1)..(3): 2'-deoxy-2'-Fluoro
  misc_feature (5)..(8): 2'-deoxy-2'-Fluoro
  misc_feature (11)..(11): 2'-deoxy-2'-Fluoro
  misc_feature (13)..(14): 2'-deoxy-2'-Fluoro
  misc_feature (16)..(18): 2'-deoxy-2'-Fluoro
uucaccuugaugccguucu

SEQ ID NO: 609 - RNA, 19 nt, Artificial Sequence
  Description of Artificial Sequence:  Synthetic
  misc_feature (2)..(3): 2'-deoxy-2'-Fluoro
  misc_feature (6)..(6): 2'-deoxy-2'-Fluoro
  misc_feature (9)..(11): 2'-deoxy-2'-Fluoro
  misc_feature (14)..(14): 2'-deoxy-2'-Fluoro
  misc_feature (16)..(16): 2'-deoxy-2'-Fluoro
gccagcaguccagcauggu

SEQ ID NO: 610 - RNA, 19 nt, Artificial Sequence
  Description of Artificial Sequence:  Synthetic
  misc_feature (1)..(1): 2'-deoxy-2'-Fluoro
  misc_feature (4)..(4): 2'-deoxy-2'-Fluoro
  misc_feature (6)..(6): 2'-deoxy-2'-Fluoro
  misc_feature (9)..(11): 2'-deoxy-2'-Fluoro
  misc_feature (14)..(14): 2'-deoxy-2'-Fluoro
  misc_feature (17)..(18): 2'-deoxy-2'-Fluoro
ugguacgaccugacgaccg

SEQ ID NO: 611 - DNA, 20 bp, Artificial Sequence
  Description of Artificial Sequence:  Synthetic
  misc_feature (1)..(18): ribonucleotide modified as described
gacuucucucaauuuucutt

SEQ ID NO: 612 - DNA, 20 bp, Artificial Sequence
  Description of Artificial Sequence:  Synthetic
  misc_feature (1)..(18): ribonucleotide modified as described
agaaaauugagagaaguctt

SEQ ID NO: 613 - DNA, 19 bp, Artificial Sequence
  Description of Artificial Sequence:  Synthetic
  misc_feature (1)..(17): ribonucleotide modified as described
acuucucucaauuuucutt

SEQ ID NO: 614 - DNA, 19 bp, Artificial Sequence
  Description of Artificial Sequence:  Synthetic
  misc_feature (1)..(17): ribonucleotide modified as described
agaaaauugagagaagutt

SEQ ID NO: 615 - DNA, 18 bp, Artificial Sequence
  Description of Artificial Sequence:  Synthetic
  misc_feature (1)..(16): ribonucleotide modified as described
cuucucucaauuuucutt

SEQ ID NO: 616 - DNA, 18 bp, Artificial Sequence
  Description of Artificial Sequence:  Synthetic
  misc_feature (1)..(16): ribonucleotide modified as described
agaaaauugagagaagtt

SEQ ID NO: 617 - DNA, 17 bp, Artificial Sequence
  Description of Artificial Sequence:  Synthetic
  misc_feature (1)..(15): ribonucleotide modified as described
uucucucaauuuucutt

SEQ ID NO: 618 - DNA, 17 bp, Artificial Sequence
  Description of Artificial Sequence:  Synthetic
  misc_feature (1)..(15): ribonucleotide modified as described
agaaaauugagagaatt

SEQ ID NO: 619 - DNA, 16 bp, Artificial Sequence
  Description of Artificial Sequence:  Synthetic
  misc_feature (1)..(14): ribonucleotide modified as described
ucucucaauuuucutt

SEQ ID NO: 620 - DNA, 16 bp, Artificial Sequence
  Description of Artificial Sequence:  Synthetic
  misc_feature (1)..(14): ribonucleotide modified as described
agaaaauugagagatt

SEQ ID NO: 621 - DNA, 20 bp, Artificial Sequence
  Description of Artificial Sequence:  Synthetic
  misc_feature (6)..(6): 2'-deoxy-2'-Fluoro
  misc_feature (11)..(11): 2'-deoxy-2'-Fluoro
  misc_feature (16)..(16): 2'-deoxy-2'-Fluoro
  misc_feature (18)..(18): 2'-deoxy-2'-Fluoro
  misc_feature (19)..(19): Phosphorothioate 3'-Internucleotide Linkage
  misc_feature (1)..(18): ribonucleotide modified as described
agaggugaagcgaagugctt

SEQ ID NO: 622 - DNA, 20 bp, Artificial Sequence
  Description of Artificial Sequence:  Synthetic
  misc_feature (1)..(3): 2'-O-methyl
  misc_feature (6)..(6): 2'-deoxy-2'-Fluoro
  misc_feature (11)..(11): 2'-deoxy-2'-Fluoro
  misc_feature (16)..(16): 2'-deoxy-2'-Fluoro
  misc_feature (18)..(18): 2'-deoxy-2'-Fluoro
  misc_feature (19)..(19): Phosphorothioate 3'-Internucleotide Linkage
  misc_feature (1)..(18): ribonucleotide modified as described
agaggugaagcgaagugctt

SEQ ID NO: 623 - RNA, 19 nt, Artificial Sequence
  Description of Artificial Sequence:  Synthetic
auaaggcuaugaagagaua

SEQ ID NO: 624 - RNA, 19 nt, Artificial Sequence
  Description of Artificial Sequence:  Synthetic
gaguuguguuuguggacga

SEQ ID NO: 625 - RNA, 19 nt, Artificial Sequence
  Description of Artificial Sequence:  Synthetic
gaacacuucuucaucguug

SEQ ID NO: 626 - RNA, 19 nt, Artificial Sequence
  Description of Artificial Sequence:  Synthetic
augccgguguugggcgcgu

SEQ ID NO: 627 - RNA, 19 nt, Artificial Sequence
  Description of Artificial Sequence:  Synthetic
ccuuauugguaugggcaaa

SEQ ID NO: 628 - RNA, 19 nt, Artificial Sequence
  Description of Artificial Sequence:  Synthetic
cucuucuuauuuauggcga

SEQ ID NO: 629 - RNA, 19 nt, Artificial Sequence
  Description of Artificial Sequence:  Synthetic
uguucuugauucauuuauu

SEQ ID NO: 630 - RNA, 19 nt, Artificial Sequence
  Description of Artificial Sequence:  Synthetic
ggcauuucauuauagcuau

SEQ ID NO: 631 - RNA, 19 nt, Artificial Sequence
  Description of Artificial Sequence:  Synthetic
uaucucuucauagccuuau

SEQ ID NO: 632 - RNA, 19 nt, Artificial Sequence
  Description of Artificial Sequence:  Synthetic
ucguccacaaacacaacuc

SEQ ID NO: 633 - RNA, 19 nt, Artificial Sequence
  Description of Artificial Sequence:  Synthetic
caacgaugaagaaguguuc

SEQ ID NO: 634 - RNA, 19 nt, Artificial Sequence
  Description of Artificial Sequence:  Synthetic
acgcgcccaacaccggcau

SEQ ID NO: 635 - RNA, 19 nt, Artificial Sequence
  Description of Artificial Sequence:  Synthetic
uuugcccauaccaauaagg

SEQ ID NO: 636 - RNA, 19 nt, Artificial Sequence
  Description of Artificial Sequence:  Synthetic
ucgccauaaauaagaagag

SEQ ID NO: 637 - RNA, 19 nt, Artificial Sequence
  Description of Artificial Sequence:  Synthetic
aauaaaugaaucaagaaca

SEQ ID NO: 638 - RNA, 19 nt, Artificial Sequence
  Description of Artificial Sequence:  Synthetic
auagcuauaaugaaaugcc

SEQ ID NO: 639 - RNA, 19 nt, Artificial Sequence
  Description of Artificial Sequence:  Synthetic
auugcuuuuacagaugcac

SEQ ID NO: 640 - RNA, 19 nt, Artificial Sequence
  Description of Artificial Sequence:  Synthetic
caucacuuacgcugaguac

SEQ ID NO: 641 - RNA, 19 nt, Artificial Sequence
  Description of Artificial Sequence:  Synthetic
ucuucaauucuuuaugccg

SEQ ID NO: 642 - RNA, 19 nt, Artificial Sequence
  Description of Artificial Sequence:  Synthetic
uauaaugaacgugaauugc

SEQ ID NO: 643 - RNA, 19 nt, Artificial Sequence
  Description of Artificial Sequence:  Synthetic
auaaugaacgugaauugcu

SEQ ID NO: 644 - RNA, 19 nt, Artificial Sequence
  Description of Artificial Sequence:  Synthetic
auuaccagggauuucaguc

SEQ ID NO: 645 - RNA, 19 nt, Artificial Sequence
  Description of Artificial Sequence:  Synthetic
ucacaucucaucuaccucc

SEQ ID NO: 646 - RNA, 19 nt, Artificial Sequence
  Description of Artificial Sequence:  Synthetic
ucuggaucuacuggucugc

SEQ ID NO: 647 - RNA, 19 nt, Artificial Sequence
  Description of Artificial Sequence:  Synthetic
auuuuuggcaaucaaauca

SEQ ID NO: 648 - RNA, 19 nt, Artificial Sequence
  Description of Artificial Sequence:  Synthetic
gauauuugauauguggauu

SEQ ID NO: 649 - RNA, 19 nt, Artificial Sequence
  Description of Artificial Sequence:  Synthetic
auuugauauguggauuucg

SEQ ID NO: 650 - RNA, 19 nt, Artificial Sequence
  Description of Artificial Sequence:  Synthetic
uuugauauguggauuucga

SEQ ID NO: 651 - RNA, 19 nt, Artificial Sequence
  Description of Artificial Sequence:  Synthetic
auauguggauuucgagucg

SEQ ID NO: 652 - RNA, 19 nt, Artificial Sequence
  Description of Artificial Sequence:  Synthetic
aagaagagcuguuucugag

SEQ ID NO: 653 - RNA, 19 nt, Artificial Sequence
  Description of Artificial Sequence:  Synthetic
uucuccuucuucgccaaaa

SEQ ID NO: 654 - RNA, 19 nt, Artificial Sequence
  Description of Artificial Sequence:  Synthetic
ucuccuucuucgccaaaag

SEQ ID NO: 655 - RNA, 19 nt, Artificial Sequence
  Description of Artificial Sequence:  Synthetic
cuccuucuucgccaaaagc

SEQ ID NO: 656 - RNA, 19 nt, Artificial Sequence
  Description of Artificial Sequence:  Synthetic
uugacaaauacgauuuauc

SEQ ID NO: 657 - RNA, 19 nt, Artificial Sequence
  Description of Artificial Sequence:  Synthetic
cuucugguggcgcuccccu

SEQ ID NO: 658 - RNA, 19 nt, Artificial Sequence
  Description of Artificial Sequence:  Synthetic
ccauuuuuugaagcgaagg

SEQ ID NO: 659 - RNA, 19 nt, Artificial Sequence
  Description of Artificial Sequence:  Synthetic
cauuuuuugaagcgaaggu

SEQ ID NO: 660 - RNA, 19 nt, Artificial Sequence
  Description of Artificial Sequence:  Synthetic
cuucuucaucguugaccgc

SEQ ID NO: 661 - RNA, 19 nt, Artificial Sequence
  Description of Artificial Sequence:  Synthetic
aucagguggcucccgcuga

SEQ ID NO: 662 - RNA, 19 nt, Artificial Sequence
  Description of Artificial Sequence:  Synthetic
ucaaguaacaaccgcgaaa

SEQ ID NO: 663 - RNA, 19 nt, Artificial Sequence
  Description of Artificial Sequence:  Synthetic
caaguaacaaccgcgaaaa

SEQ ID NO: 664 - RNA, 19 nt, Artificial Sequence
  Description of Artificial Sequence:  Synthetic
gugcaucuguaaaagcaau

SEQ ID NO: 665 - RNA, 19 nt, Artificial Sequence
  Description of Artificial Sequence:  Synthetic
guacucagcguaagugaug

SEQ ID NO: 666 - RNA, 19 nt, Artificial Sequence
  Description of Artificial Sequence:  Synthetic
cggcauaaagaauugaaga

SEQ ID NO: 667 - RNA, 19 nt, Artificial Sequence
  Description of Artificial Sequence:  Synthetic
gcaauucacguucauuaua

SEQ ID NO: 668 - RNA, 19 nt, Artificial Sequence
  Description of Artificial Sequence:  Synthetic
agcaauucacguucauuau

SEQ ID NO: 669 - RNA, 19 nt, Artificial Sequence
  Description of Artificial Sequence:  Synthetic
gacugaaaucccugguaau

SEQ ID NO: 670 - RNA, 19 nt, Artificial Sequence
  Description of Artificial Sequence:  Synthetic
ggagguagaugagauguga

SEQ ID NO: 671 - RNA, 19 nt, Artificial Sequence
  Description of Artificial Sequence:  Synthetic
gcagaccaguagauccaga

SEQ ID NO: 672 - RNA, 19 nt, Artificial Sequence
  Description of Artificial Sequence:  Synthetic
ugauuugauugccaaaaau

SEQ ID NO: 673 - RNA, 19 nt, Artificial Sequence
  Description of Artificial Sequence:  Synthetic
aauccacauaucaaauauc

SEQ ID NO: 674 - RNA, 19 nt, Artificial Sequence
  Description of Artificial Sequence:  Synthetic
cgaaauccacauaucaaau

SEQ ID NO: 675 - RNA, 19 nt, Artificial Sequence
  Description of Artificial Sequence:  Synthetic
ucgaaauccacauaucaaa

SEQ ID NO: 676 - RNA, 19 nt, Artificial Sequence
  Description of Artificial Sequence:  Synthetic
cgacucgaaauccacauau

SEQ ID NO: 677 - RNA, 19 nt, Artificial Sequence
  Description of Artificial Sequence:  Synthetic
cucagaaacagcucuucuu

SEQ ID NO: 678 - RNA, 19 nt, Artificial Sequence
  Description of Artificial Sequence:  Synthetic
uuuuggcgaagaaggagaa

SEQ ID NO: 679 - RNA, 19 nt, Artificial Sequence
  Description of Artificial Sequence:  Synthetic
cuuuuggcgaagaaggaga

SEQ ID NO: 680 - RNA, 19 nt, Artificial Sequence
  Description of Artificial Sequence:  Synthetic
gcuuuuggcgaagaaggag

SEQ ID NO: 681 - RNA, 19 nt, Artificial Sequence
  Description of Artificial Sequence:  Synthetic
gauaaaucguauuugucaa

SEQ ID NO: 682 - RNA, 19 nt, Artificial Sequence
  Description of Artificial Sequence:  Synthetic
aggggagcgccaccagaag

SEQ ID NO: 683 - RNA, 19 nt, Artificial Sequence
  Description of Artificial Sequence:  Synthetic
ccuucgcuucaaaaaaugg

SEQ ID NO: 684 - RNA, 19 nt, Artificial Sequence
  Description of Artificial Sequence:  Synthetic
accuucgcuucaaaaaaug

SEQ ID NO: 685 - RNA, 19 nt, Artificial Sequence
  Description of Artificial Sequence:  Synthetic
gcggucaacgaugaagaag

SEQ ID NO: 686 - RNA, 19 nt, Artificial Sequence
  Description of Artificial Sequence:  Synthetic
ucagcgggagccaccugau

SEQ ID NO: 687 - RNA, 19 nt, Artificial Sequence
  Description of Artificial Sequence:  Synthetic
uuucgcgguuguuacuuga

SEQ ID NO: 688 - RNA, 19 nt, Artificial Sequence
  Description of Artificial Sequence:  Synthetic
uuuucgcgguuguuacuug

SEQ ID NO: 689 - RNA, 19 nt, Artificial Sequence
  Description of Artificial Sequence:  Synthetic
  misc_feature (4)..(11): 2'-deoxy-2'-Fluoro
  misc_feature (14)..(19): 2'-deoxy-2'-Fluoro
ggacuucucucaauuuucu

SEQ ID NO: 690 - RNA, 19 nt, Artificial Sequence
  Description of Artificial Sequence:  Synthetic
  misc_feature (7)..(8): 2'-deoxy-2'-Fluoro
  misc_feature (17)..(19): 2'-deoxy-2'-Fluoro
agaaaauugagagaagucc

SEQ ID NO: 691 - RNA, 19 nt, Artificial Sequence
  Description of Artificial Sequence:  Synthetic
agaaaauugagagaagucc

SEQ ID NO: 692 - RNA, 19 nt, Artificial Sequence
  Description of Artificial Sequence:  Synthetic
auccugaaucaccacaucc

SEQ ID NO: 693 - RNA, 19 nt, Artificial Sequence
  Description of Artificial Sequence:  Synthetic
cugaguuuaaaaggcaccc

SEQ ID NO: 694 - RNA, 19 nt, Artificial Sequence
  Description of Artificial Sequence:  Synthetic
  misc_feature (1)..(1): 5'-3 attached terminal deoxyabasic moiety
gggugccuuuuaaacucag

SEQ ID NO: 695 - RNA, 19 nt, Artificial Sequence
  Description of Artificial Sequence:  Synthetic
  misc_feature (1)..(2): 2'-deoxy-2'-Fluoro
  misc_feature (6)..(8): 2'-deoxy-2'-Fluoro
  misc_feature (15)..(15): 2'-deoxy-2'-Fluoro
  misc_feature (17)..(19): 2'-deoxy-2'-Fluoro
cugaguuuaaaaggcaccc

SEQ ID NO: 696 - RNA, 19 nt, Artificial Sequence
  Description of Artificial Sequence:  Synthetic
  misc_feature (4)..(4): 2'-deoxy-2'-Fluoro
  misc_feature (6)..(11): 2'-deoxy-2'-Fluoro
  misc_feature (15)..(17): 2'-deoxy-2'-Fluoro
gggugccuuuuaaacucag

SEQ ID NO: 697 - RNA, 31 nt, Artificial Sequence
  Description of Artificial Sequence:  Synthetic
  misc_feature (1)..(1): 5'-phosphate
  misc_feature (31)..(31): 3'-3 attached terminal deoxyabasic moiety
acccuaucaggcaguaccaguacugccugau

SEQ ID NO: 698 - RNA, 31 nt, Artificial Sequence
  Description of Artificial Sequence:  Synthetic
  misc_feature (1)..(1): 5'-phosphate
  misc_feature (31)..(31): 3'-3 attached terminal deoxyabasic moiety
acccuaucaggcaguaccgguacugccugau

SEQ ID NO: 699 - RNA, 31 nt, Artificial Sequence
  Description of Artificial Sequence:  Synthetic
  misc_feature (1)..(1): 5'-phosphate
  misc_feature (31)..(31): 3'-3 attached terminal deoxyabasic moiety
ggucuacgagaccucccggaggucucguaga

SEQ ID NO: 700 - RNA, 28 nt, Artificial Sequence
  Description of Artificial Sequence:  Synthetic
  misc_feature (1)..(1): 5'-phosphate
  misc_feature (28)..(28): 3'-3 attached terminal deoxyabasic moiety
ggucuacgagaccuccggaggucucgua

SEQ ID NO: 701 - RNA, 28 nt, Artificial Sequence
  Description of Artificial Sequence:  Synthetic
  misc_feature (1)..(1): 5'-phosphate
  misc_feature (28)..(28): 3'-3 attached terminal deoxyabasic moiety
gggugccuuuuaaacucgaguuuaaaag

SEQ ID NO: 702 - RNA, 30 nt, Artificial Sequence
  Description of Artificial Sequence:  Synthetic
  misc_feature (1)..(1): 5'-phosphate
  misc_feature (30)..(30): 3'-3 attached terminal deoxyabasic moiety
gggugccuuuuaaacucaggaguuuaaaag

SEQ ID NO: 703 - RNA, 32 nt, Artificial Sequence
  Description of Artificial Sequence:  Synthetic
  misc_feature (1)..(1): 5'-phosphate
  misc_feature (32)..(32): 3'-3 attached terminal deoxyabasic moiety
caucagaggcccuccuugcaaggagggccucu

SEQ ID NO: 704 - RNA, 31 nt, Artificial Sequence
  Description of Artificial Sequence:  Synthetic
  misc_feature (1)..(1): 5'-phosphate
  misc_feature (31)..(31): 3'-3 attached terminal deoxyabasic moiety
caucagaggcccuccuuaaggagggccucug

SEQ ID NO: 705 - RNA, 29 nt, Artificial Sequence
  Description of Artificial Sequence:  Synthetic
  misc_feature (1)..(1): 5'-phosphate
  misc_feature (29)..(29): 3'-3 attached terminal deoxyabasic moiety
caucagaggcccuccuaggagggccucug

SEQ ID NO: 706 - RNA, 33 nt, Artificial Sequence
  Description of Artificial Sequence:  Synthetic
  misc_feature (1)..(1): 5'-phosphate
  misc_feature (33)..(33): 3'-3 attached terminal deoxyabasic moiety
guucugcgacauucggcuugccgaaugucgcca

SEQ ID NO: 707 - RNA, 31 nt, Artificial Sequence
  Description of Artificial Sequence:  Synthetic
  misc_feature (1)..(1): 5'-phosphate
  misc_feature (31)..(31): 3'-3 attached terminal deoxyabasic moiety
guucugcgacauucggcgccgaaugucgcca

SEQ ID NO: 708 - RNA, 30 nt, Artificial Sequence
  Description of Artificial Sequence:  Synthetic
  misc_feature (30)..(30): 3'-3 attached terminal deoxyabasic moiety
aggugaagcgaagugcacacuucgcuucau

SEQ ID NO: 709 - RNA, 25 nt, Artificial Sequence
  Description of Artificial Sequence:  Synthetic
  misc_feature (1)..(1): 5'-phosphate
  misc_feature (25)..(25): 3'-3 attached terminal deoxyabasic moiety
aggugaagcgaagugcacuucgcuu

SEQ ID NO: 710 - RNA, 26 nt, Artificial Sequence
  Description of Artificial Sequence:  Synthetic
  misc_feature (1)..(1): 5'-phosphate
  misc_feature (26)..(26): 3'-3 attached terminal deoxyabasic moiety
aggugaagcgaagugcacuucgcuuc

SEQ ID NO: 711 - RNA, 28 nt, Artificial Sequence
  Description of Artificial Sequence:  Synthetic
  misc_feature (1)..(1): 5'-phosphate
  misc_feature (28)..(28): 3'-3 attached terminal deoxyabasic moiety
aggugaagcgaagugcacuucgcuucac

SEQ ID NO: 712 - RNA, 26 nt, Artificial Sequence
  Description of Artificial Sequence:  Synthetic
  misc_feature (1)..(1): 5'-phosphate
  misc_feature (26)..(26): 3'-3 attached terminal deoxyabasic moiety
aggugaagcgaaguacuucgcuucac

SEQ ID NO: 713 - RNA, 30 nt, Artificial Sequence
  Description of Artificial Sequence:  Synthetic
  misc_feature (1)..(1): 5'-phosphate
  misc_feature (30)..(30): 3'-3 attached terminal deoxyabasic moiety
gugcugggugccuuuuaaaaggcacccagc

SEQ ID NO: 714 - RNA, 28 nt, Artificial Sequence
  Description of Artificial Sequence:  Synthetic
  misc_feature (1)..(1): 5'-phosphate
  misc_feature (28)..(28): 3'-3 attached terminal deoxyabasic moiety
gugcugggugccuuuaaaggcacccagc

SEQ ID NO: 715 - RNA, 26 nt, Artificial Sequence
  Description of Artificial Sequence:  Synthetic
  misc_feature (1)..(1): 5'-phosphate
  misc_feature (26)..(26): 3'-3 attached terminal deoxyabasic moiety
gugcugggugccuuaaggcacccagc

SEQ ID NO: 716 - RNA, 27 nt, Artificial Sequence
  Description of Artificial Sequence:  Synthetic
  misc_feature (1)..(1): 5'-phosphate
  misc_feature (27)..(27): 3'-3 attached terminal deoxyabasic moiety
aaugcuuuaucauauauaugauaaagc

SEQ ID NO: 717 - RNA, 25 nt, Artificial Sequence
  Description of Artificial Sequence:  Synthetic
  misc_feature (1)..(1): 5'-phosphate
  misc_feature (25)..(25): 3'-3 attached terminal deoxyabasic moiety
aaugcuuuaucauauaugauaaagc

SEQ ID NO: 718 - RNA, 23 nt, Artificial Sequence
  Description of Artificial Sequence:  Synthetic
  misc_feature (1)..(1): 5'-phosphate
  misc_feature (23)..(23): 3'-3 attached terminal deoxyabasic moiety
aaugcuuuaucauaugauaaagc

SEQ ID NO: 719 - RNA, 24 nt, Artificial Sequence
  Description of Artificial Sequence:  Synthetic
  misc_feature (1)..(1): 5'-phosphate
  misc_feature (24)..(24): 3'-3 attached terminal deoxyabasic moiety
aaugcuuuaucauaugauaaagca

SEQ ID NO: 720 - RNA, 28 nt, Artificial Sequence
  Description of Artificial Sequence:  Synthetic
  misc_feature (1)..(1): 5'-phosphate
  misc_feature (28)..(28): 3'-3 attached terminal deoxyabasic moiety
aaugcuuuaucauauaugauaaagcauu

SEQ ID NO: 721 - RNA, 26 nt, Artificial Sequence
  Description of Artificial Sequence:  Synthetic
  misc_feature (1)..(1): 5'-phosphate
  misc_feature (26)..(26): 3'-3 attached terminal deoxyabasic moiety
aaugcuuuaucauaugauaaagcauu

SEQ ID NO: 722 - RNA, 31 nt, Artificial Sequence
  Description of Artificial Sequence:  Synthetic
  misc_feature (1)..(1): 5'-phosphate
  misc_feature (31)..(31): 3'-3 attached terminal deoxyabasic moiety
gggugccuuuuaaacucaggaguuuaaaagg

SEQ ID NO: 723 - RNA, 31 nt, Artificial Sequence
  Description of Artificial Sequence:  Synthetic
  misc_feature (1)..(1): 5'-phosphate
  misc_feature (31)..(31): 3'-3 attached terminal deoxyabasic moiety
gggugccuuuuaaacucgaguuuaaaaggca

SEQ ID NO: 724 - RNA, 27 nt, Artificial Sequence
  Description of Artificial Sequence:  Synthetic
  misc_feature (1)..(1): 5'-phosphate
  misc_feature (27)..(27): 3'-3 attached terminal deoxyabasic moiety
gggugccuuuuaaacuaguuuaaaagg

SEQ ID NO: 725 - RNA, 28 nt, Artificial Sequence
  Description of Artificial Sequence:  Synthetic
  misc_feature (1)..(1): 5'-phosphate
  misc_feature (28)..(28): 3'-3 attached terminal deoxyabasic moiety
gggugccuuuuaaacuaguuuaaaaggc

SEQ ID NO: 726 - RNA, 29 nt, Artificial Sequence
  Description of Artificial Sequence:  Synthetic
  misc_feature (1)..(1): 5'-phosphate
  misc_feature (29)..(29): 3'-3 attached terminal deoxyabasic moiety
gggugccuuuuaaacuaguuuaaaaggca

SEQ ID NO: 727 - RNA, 30 nt, Artificial Sequence
  Description of Artificial Sequence:  Synthetic
  misc_feature (1)..(1): 5'-phosphate
  misc_feature (30)..(30): 3'-3 attached terminal deoxyabasic moiety
gggugccuuuuaaacuaguuuaaaaggcac

SEQ ID NO: 728 - RNA, 26 nt, Artificial Sequence
  Description of Artificial Sequence:  Synthetic
  misc_feature (1)..(1): 5'-phosphate
  misc_feature (26)..(26): 3'-3 attached terminal deoxyabasic moiety
gggugccuuuuaaacguuuaaaaggc

SEQ ID NO: 729 - RNA, 27 nt, Artificial Sequence
  Description of Artificial Sequence:  Synthetic
  misc_feature (1)..(1): 5'-phosphate
  misc_feature (27)..(27): 3'-3 attached terminal deoxyabasic moiety
gggugccuuuuaaacguuuaaaaggca

SEQ ID NO: 730 - RNA, 28 nt, Artificial Sequence
  Description of Artificial Sequence:  Synthetic
  misc_feature (1)..(1): 5'-phosphate
  misc_feature (28)..(28): 3'-3 attached terminal deoxyabasic moiety
gggugccuuuuaaacguuuaaaaggcac

SEQ ID NO: 731 - RNA, 29 nt, Artificial Sequence
  Description of Artificial Sequence:  Synthetic
  misc_feature (1)..(1): 5'-phosphate
  misc_feature (29)..(29): 3'-3 attached terminal deoxyabasic moiety
ugcugggugccuuuuaaaaggcacccagc

SEQ ID NO: 732 - RNA, 28 nt, Artificial Sequence
  Description of Artificial Sequence:  Synthetic
  misc_feature (1)..(1): 5'-phosphate
  misc_feature (28)..(28): 3'-3 attached terminal deoxyabasic moiety
gcugggugccuuuuaaaaggcacccagc

SEQ ID NO: 733 - RNA, 29 nt, Artificial Sequence
  Description of Artificial Sequence:  Synthetic
  misc_feature (1)..(1): 5'-phosphate
  misc_feature (29)..(29): 3'-3 attached terminal deoxyabasic moiety
gcugggugccuuuuaaaaggcacccagcn

SEQ ID NO: 734 - RNA, 27 nt, Artificial Sequence
  Description of Artificial Sequence:  Synthetic
  misc_feature (1)..(1): 5'-phosphate
  misc_feature (27)..(27): 3'-3 attached terminal deoxyabasic moiety
gcugggugccuuuuaaaaggcacccag

SEQ ID NO: 735 - RNA, 26 nt, Artificial Sequence
  Description of Artificial Sequence:  Synthetic
  misc_feature (1)..(1): 5'-phosphate
  misc_feature (26)..(26): 3'-3 attached terminal deoxyabasic moiety
cugggugccuuuuaaaaggcacccag

SEQ ID NO: 736 - RNA, 25 nt, Artificial Sequence
  Description of Artificial Sequence:  Synthetic
  misc_feature (1)..(1): 5'-phosphate
  misc_feature (25)..(25): 3'-3 attached terminal deoxyabasic moiety
cugggugccuuuuaaaaggcaccca

SEQ ID NO: 737 - RNA, 24 nt, Artificial Sequence
  Description of Artificial Sequence:  Synthetic
  misc_feature (1)..(1): 5'-phosphate
  misc_feature (24)..(24): 3'-3 attached terminal deoxyabasic moiety
ugggugccuuuuaaaaggcaccca

SEQ ID NO: 738 - RNA, 25 nt, Artificial Sequence
  Description of Artificial Sequence:  Synthetic
  misc_feature (1)..(1): 5'-phosphate
  misc_feature (25)..(25): 3'-3 attached terminal deoxyabasic moiety
ugggugccuuuuaaaaggcacccan

SEQ ID NO: 739 - DNA, 26 bp, Artificial Sequence
  Description of Artificial Sequence:  Synthetic
  misc_feature (1)..(1): 5'-phosphate
  misc_feature (1)..(24): ribonucleotide modified as described
  misc_feature (26)..(26): 3'-3 attached terminal deoxyabasic moiety
ugggugccuuuuaaaaggcacccatt

SEQ ID NO: 740 - RNA, 26 nt, Artificial Sequence
  Description of Artificial Sequence:  Synthetic
  misc_feature (1)..(1): 5'-phosphate
  misc_feature (26)..(26): 3'-3 attached terminal deoxyabasic moiety
ugcuuuaucauauauaugauaaagca

SEQ ID NO: 741 - RNA, 25 nt, Artificial Sequence
  Description of Artificial Sequence:  Synthetic
  misc_feature (1)..(1): 5'-phosphate
  misc_feature (25)..(25): 3'-3 attached terminal deoxyabasic moiety
ugcuuuaucauauauaugauaaagc

SEQ ID NO: 742 - RNA, 24 nt, Artificial Sequence
  Description of Artificial Sequence:  Synthetic
  misc_feature (1)..(1): 5'-phosphate
  misc_feature (24)..(24): 3'-3 attached terminal deoxyabasic moiety
gcuuuaucauauauaugauaaagc

SEQ ID NO: 743 - RNA, 28 nt, Artificial Sequence
  Description of Artificial Sequence:  Synthetic
  misc_feature (1)..(1): 5'-phosphate
  misc_feature (28)..(28): 3'-3 attached terminal deoxyabasic moiety
aaugcuuuaucauauaugauaaagcauu

SEQ ID NO: 744 - RNA, 29 nt, Artificial Sequence
  Description of Artificial Sequence:  Synthetic
  misc_feature (1)..(1): 5'-phosphate
  misc_feature (29)..(29): 3'-3 attached terminal deoxyabasic moiety
aaugcuuuaucauauaugauaaagcauun

SEQ ID NO: 745 - DNA, 30 bp, Artificial Sequence
  Description of Artificial Sequence:  Synthetic
  misc_feature (1)..(1): 5'-phosphate
  misc_feature (1)..(28): ribonucleotide modified as described
  misc_feature (30)..(30): 3'-3 attached terminal deoxyabasic moiety
aaugcuuuaucauauaugauaaagcauutt

SEQ ID NO: 746 - RNA, 27 nt, Artificial Sequence
  Description of Artificial Sequence:  Synthetic
  misc_feature (1)..(1): 5'-phosphate
  misc_feature (27)..(27): 3'-3 attached terminal deoxyabasic moiety
aaugcuuuaucauauaugauaaagcau

SEQ ID NO: 747 - RNA, 26 nt, Artificial Sequence
  Description of Artificial Sequence:  Synthetic
  misc_feature (1)..(1): 5'-phosphate
  misc_feature (26)..(26): 3'-3 attached terminal deoxyabasic moiety
augcuuuaucauauaugauaaagcau

SEQ ID NO: 748 - RNA, 26 nt, Artificial Sequence
  Description of Artificial Sequence:  Synthetic
  misc_feature (1)..(1): 5'-phosphate
  misc_feature (26)..(26): 3'-3 attached terminal deoxyabasic moiety
augcuuuaucauauaugauaaagcau

SEQ ID NO: 749 - DNA, 27 bp, Artificial Sequence
  Description of Artificial Sequence:  Synthetic
  misc_feature (1)..(1): 5'-phosphate
  misc_feature (1)..(26): ribonucleotide
  misc_feature (27)..(27): 3'-3 attached terminal deoxyabasic moiety
augcuuuaucauauaugauaaagcaut

SEQ ID NO: 750 - RNA, 25 nt, Artificial Sequence
  Description of Artificial Sequence:  Synthetic
  misc_feature (1)..(1): 5'-phosphate
  misc_feature (25)..(25): 3'-3 attached terminal deoxyabasic moiety
augcuuuaucauauaugauaaagca

SEQ ID NO: 751 - RNA, 28 nt, Artificial Sequence
  Description of Artificial Sequence:  Synthetic
  misc_feature (1)..(1): 5'-phosphate
  misc_feature (28)..(28): 3'-3 attached terminal deoxyabasic moiety
aaugcuuuaucauauaucuauaagcauu

SEQ ID NO: 752 - RNA, 28 nt, Artificial Sequence
  Description of Artificial Sequence:  Synthetic
  misc_feature (1)..(1): 5'-phosphate
  misc_feature (28)..(28): 3'-3 attached terminal deoxyabasic moiety
aaugcuuuuaguuauaugauaaagcauu

SEQ ID NO: 753 - RNA, 28 nt, Artificial Sequence
  Description of Artificial Sequence:  Synthetic
  misc_feature (1)..(1): 5'-phosphate
  misc_feature (28)..(28): 3'-3 attached terminal deoxyabasic moiety
aauccuuaaucuuauuugauaaagcauu

SEQ ID NO: 754 - RNA, 28 nt, Artificial Sequence
  Description of Artificial Sequence:  Synthetic
  misc_feature (1)..(1): 5'-phosphate
  misc_feature (3)..(3): 2'-deoxy-2'-Fluoro
  misc_feature (5)..(9): 2'-deoxy-2'-Fluoro
  misc_feature (11)..(12): 2'-deoxy-2'-Fluoro
  misc_feature (14)..(14): 2'-deoxy-2'-Fluoro
  misc_feature (16)..(16): 2'-deoxy-2'-Fluoro
  misc_feature (18)..(18): 2'-deoxy-2'-Fluoro
  misc_feature (21)..(21): 2'-deoxy-2'-Fluoro
  misc_feature (26)..(26): 2'-deoxy-2'-Fluoro
  misc_feature (28)..(29): 2'-deoxy-2'-Fluoro
  misc_feature (29)..(29): 3'-3 attached terminal deoxyabasic moiety
aaugcuuuaucauauaugauaaagcauu

SEQ ID NO: 755 - RNA, 28 nt, Artificial Sequence
  Description of Artificial Sequence:  Synthetic
  misc_feature (1)..(1): 5'-phosphate
  misc_feature (3)..(3): 2'-deoxy-2'-Fluoro
  misc_feature (5)..(8): 2'-deoxy-2'-Fluoro
  misc_feature (10)..(11): 2'-deoxy-2'-Fluoro
  misc_feature (13)..(13): 2'-deoxy-2'-Fluoro
  misc_feature (15)..(15): 2'-deoxy-2'-Fluoro
  misc_feature (17)..(17): 2'-deoxy-2'-Fluoro
  misc_feature (20)..(20): 2'-deoxy-2'-Fluoro
  misc_feature (25)..(25): 2'-deoxy-2'-Fluoro
  misc_feature (27)..(28): 2'-deoxy-2'-Fluoro
  misc_feature (28)..(28): 3'-3 attached terminal deoxyabasic moiety
aaugcuuuaucauauaugauaaagcauu

SEQ ID NO: 756 - RNA, 28 nt, Artificial Sequence
  Description of Artificial Sequence:  Synthetic
  misc_feature (1)..(1): 5'-phosphate
  misc_feature (28)..(28): 3'-3 attached terminal deoxyabasic moiety
cgagcagggguccuaggaccccugcucg

SEQ ID NO: 757 - RNA, 26 nt, Artificial Sequence
  Description of Artificial Sequence:  Synthetic
  misc_feature (1)..(1): 5'-phosphate
  misc_feature (26)..(26): 3'-3 attached terminal deoxyabasic moiety
gagcagggguccuaggaccccugcuc

SEQ ID NO: 758 - RNA, 24 nt, Artificial Sequence
  Description of Artificial Sequence:  Synthetic
  misc_feature (1)..(1): 5'-phosphate
  misc_feature (24)..(24): 3'-3 attached terminal deoxyabasic moiety
agcagggguccuaggaccccugcu

SEQ ID NO: 759 - RNA, 22 nt, Artificial Sequence
  Description of Artificial Sequence:  Synthetic
  misc_feature (1)..(1): 5'-phosphate
  misc_feature (22)..(22): 3'-3 attached terminal deoxyabasic moiety
gcagggguccuaggaccccugc

SEQ ID NO: 760 - RNA, 26 nt, Artificial Sequence
  Description of Artificial Sequence:  Synthetic
  misc_feature (1)..(1): 5'-phosphate
  misc_feature (26)..(26): 3'-3 attached terminal deoxyabasic moiety
ccaccacgagucuagacucguggugg

SEQ ID NO: 761 - RNA, 22 nt, Artificial Sequence
  Description of Artificial Sequence:  Synthetic
  misc_feature (1)..(1): 5'-phosphate
  misc_feature (22)..(22): 3'-3 attached terminal deoxyabasic moiety
accacgagucuagacucguggu

SEQ ID NO: 762 - RNA, 20 nt, Artificial Sequence
  Description of Artificial Sequence:  Synthetic
  misc_feature (1)..(1): 5'-phosphate
  misc_feature (20)..(20): 3'-3 attached terminal deoxyabasic moiety
ccacgagucuagacucgugg

SEQ ID NO: 763 - RNA, 28 nt, Artificial Sequence
  Description of Artificial Sequence:  Synthetic
  misc_feature (1)..(1): 5'-phosphate
  misc_feature (28)..(28): 3'-3 attached terminal deoxyabasic moiety
ggugaagcgaagugcacuucgcuucacc

SEQ ID NO: 764 - RNA, 26 nt, Artificial Sequence
  Description of Artificial Sequence:  Synthetic
  misc_feature (1)..(1): 5'-phosphate
  misc_feature (26)..(26): 3'-3 attached terminal deoxyabasic moiety
gugaagcgaagugcacuucgcuucac

SEQ ID NO: 765 - RNA, 24 nt, Artificial Sequence
  Description of Artificial Sequence:  Synthetic
  misc_feature (1)..(1): 5'-phosphate
  misc_feature (24)..(24): 3'-3 attached terminal deoxyabasic moiety
ugaagcgaagugcacuucgcuuca

SEQ ID NO: 766 - RNA, 28 nt, Artificial Sequence
  Description of Artificial Sequence:  Synthetic
  misc_feature (1)..(1): 5'-phosphate
  misc_feature (28)..(28): 3'-3 attached terminal deoxyabasic moiety
ucauacuaacgccauggcguuaguauga

SEQ ID NO: 767 - RNA, 26 nt, Artificial Sequence
  Description of Artificial Sequence:  Synthetic
  misc_feature (1)..(1): 5'-phosphate
  misc_feature (26)..(26): 3'-3 attached terminal deoxyabasic moiety
cauacuaacgccauggcguuaguaug

SEQ ID NO: 768 - RNA, 24 nt, Artificial Sequence
  Description of Artificial Sequence:  Synthetic
  misc_feature (1)..(1): 5'-phosphate
  misc_feature (24)..(24): 3'-3 attached terminal deoxyabasic moiety
auacuaacgccauggcguuaguau

SEQ ID NO: 769 - RNA, 22 nt, Artificial Sequence
  Description of Artificial Sequence:  Synthetic
  misc_feature (1)..(1): 5'-phosphate
  misc_feature (22)..(22): 3'-3 attached terminal deoxyabasic moiety
uacuaacgccauggcguuagua

SEQ ID NO: 770 - RNA, 28 nt, Artificial Sequence
  Description of Artificial Sequence:  Synthetic
  misc_feature (1)..(1): 5'-phosphate
  misc_feature (28)..(28): 3'-3 attached terminal deoxyabasic moiety
acuauggcucucccgggagagccauagu

SEQ ID NO: 771 - RNA, 26 nt, Artificial Sequence
  Description of Artificial Sequence:  Synthetic
  misc_feature (1)..(1): 5'-phosphate
  misc_feature (26)..(26): 3'-3 attached terminal deoxyabasic moiety
cuauggcucucccgggagagccauag

SEQ ID NO: 772 - RNA, 24 nt, Artificial Sequence
  Description of Artificial Sequence:  Synthetic
  misc_feature (1)..(1): 5'-phosphate
  misc_feature (24)..(24): 3'-3 attached terminal deoxyabasic moiety
uauggcucucccgggagagccaua

SEQ ID NO: 773 - RNA, 22 nt, Artificial Sequence
  Description of Artificial Sequence:  Synthetic
  misc_feature (1)..(1): 5'-phosphate
  misc_feature (22)..(22): 3'-3 attached terminal deoxyabasic moiety
auggcucucccgggagagccau

SEQ ID NO: 774 - RNA, 20 nt, Artificial Sequence
  Description of Artificial Sequence:  Synthetic
  misc_feature (1)..(1): 5'-phosphate
  misc_feature (20)..(20): 3'-3 attached terminal deoxyabasic moiety
uggcucucccgggagagcca

SEQ ID NO: 775 - RNA, 28 nt, Artificial Sequence
  Description of Artificial Sequence:  Synthetic
  misc_feature (1)..(1): 5'-phosphate
  misc_feature (28)..(28): 3'-3 attached terminal deoxyabasic moiety
ccgguguacucaccggugaguacaccgg

SEQ ID NO: 776 - RNA, 26 nt, Artificial Sequence
  Description of Artificial Sequence:  Synthetic
  misc_feature (1)..(1): 5'-phosphate
  misc_feature (26)..(26): 3'-3 attached terminal deoxyabasic moiety
cgguguacucaccggugaguacaccg

SEQ ID NO: 777 - RNA, 24 nt, Artificial Sequence
  Description of Artificial Sequence:  Synthetic
  misc_feature (1)..(1): 5'-phosphate
  misc_feature (24)..(24): 3'-3 attached terminal deoxyabasic moiety
gguguacucaccggugaguacacc

SEQ ID NO: 778 - RNA, 28 nt, Artificial Sequence
  Description of Artificial Sequence:  Synthetic
  misc_feature (1)..(1): 5'-phosphate
  misc_feature (28)..(28): 3'-3 attached terminal deoxyabasic moiety
cuacgagaccucccgggaggucucguag

SEQ ID NO: 779 - RNA, 26 nt, Artificial Sequence
  Description of Artificial Sequence:  Synthetic
  misc_feature (1)..(1): 5'-phosphate
  misc_feature (26)..(26): 3'-3 attached terminal deoxyabasic moiety
uacgagaccucccgggaggucucgua

SEQ ID NO: 780 - RNA, 24 nt, Artificial Sequence
  Description of Artificial Sequence:  Synthetic
  misc_feature (1)..(1): 5'-phosphate
  misc_feature (24)..(24): 3'-3 attached terminal deoxyabasic moiety
acgagaccucccgggaggucucgu

SEQ ID NO: 781 - DNA, 21 bp, Artificial Sequence
  Description of Artificial Sequence:  Synthetic
  misc_feature (1)..(19): ribonucleotide
cucacugccacucuaauugtt

SEQ ID NO: 782 - DNA, 21 bp, Artificial Sequence
  Description of Artificial Sequence:  Synthetic
  misc_feature (1)..(19): ribonucleotide
ucacugccacucuaauugutt

SEQ ID NO: 783 - DNA, 21 bp, Artificial Sequence
  Description of Artificial Sequence:  Synthetic
  misc_feature (1)..(19): ribonucleotide
cacugccacucuaauuguctt

SEQ ID NO: 784 - DNA, 21 bp, Artificial Sequence
  Description of Artificial Sequence:  Synthetic
  misc_feature (1)..(19): ribonucleotide
gaccccgucucuauaccaatt

SEQ ID NO: 785 - DNA, 21 bp, Artificial Sequence
  Description of Artificial Sequence:  Synthetic
  misc_feature (1)..(19): ribonucleotide
agaguggcagugagcaaagtt

SEQ ID NO: 786 - DNA, 21 bp, Artificial Sequence
  Description of Artificial Sequence:  Synthetic
  misc_feature (1)..(19): ribonucleotide
agagacggggucagagagatt

SEQ ID NO: 787 - DNA, 21 bp, Artificial Sequence
  Description of Artificial Sequence:  Synthetic
  misc_feature (1)..(19): ribonucleotide
agcauuuguuuguacaagatt

SEQ ID NO: 788 - DNA, 21 bp, Artificial Sequence
  Description of Artificial Sequence:  Synthetic
  misc_feature (1)..(19): ribonucleotide
gcacuucgcuucaccucugtt

SEQ ID NO: 789 - DNA, 21 bp, Artificial Sequence
  Description of Artificial Sequence:  Synthetic
  misc_feature (1)..(19): ribonucleotide
caauuagaguggcagugagtt

SEQ ID NO: 790 - DNA, 21 bp, Artificial Sequence
  Description of Artificial Sequence:  Synthetic
  misc_feature (1)..(19): ribonucleotide
acaauuagaguggcagugatt

SEQ ID NO: 791 - DNA, 21 bp, Artificial Sequence
  Description of Artificial Sequence:  Synthetic
  misc_feature (1)..(19): ribonucleotide
gacaauuagaguggcagugtt

SEQ ID NO: 792 - DNA, 21 bp, Artificial Sequence
  Description of Artificial Sequence:  Synthetic
  misc_feature (1)..(19): ribonucleotide
uugguauagagacgggguctt

SEQ ID NO: 793 - DNA, 21 bp, Artificial Sequence
  Description of Artificial Sequence:  Synthetic
  misc_feature (1)..(19): ribonucleotide
cuuugcucacugccacucutt

SEQ ID NO: 794 - DNA, 21 bp, Artificial Sequence
  Description of Artificial Sequence:  Synthetic
  misc_feature (1)..(19): ribonucleotide
ucucucugaccccgucucutt

SEQ ID NO: 795 - DNA, 21 bp, Artificial Sequence
  Description of Artificial Sequence:  Synthetic
  misc_feature (1)..(19): ribonucleotide
ucuuguacaaacaaaugcutt

SEQ ID NO: 796 - DNA, 21 bp, Artificial Sequence
  Description of Artificial Sequence:  Synthetic
  misc_feature (1)..(19): ribonucleotide
cagaggugaagcgaagugctt

SEQ ID NO: 797 - DNA, 26 bp, Artificial Sequence
  Description of Artificial Sequence:  Synthetic
  misc_feature (1)..(24): ribonucleotide
caauuagaguggcagugagcaaagtt

SEQ ID NO: 798 - DNA, 27 bp, Artificial Sequence
  Description of Artificial Sequence:  Synthetic
  misc_feature (1)..(25): ribonucleotide
acaauuagaguggcagugagcaaagtt

SEQ ID NO: 799 - DNA, 28 bp, Artificial Sequence
  Description of Artificial Sequence:  Synthetic
  misc_feature (1)..(26): ribonucleotide
gacaauuagaguggcagugagcaaagtt

SEQ ID NO: 800 - DNA, 35 bp, Artificial Sequence
  Description of Artificial Sequence:  Synthetic
  misc_feature (1)..(33): ribonucleotide
ugugccagcaguccagcauuuguuuguacaagatt

SEQ ID NO: 801 - DNA, 28 bp, Artificial Sequence
  Description of Artificial Sequence:  Synthetic
  misc_feature (1)..(26): ribonucleotide
uugguauagagacggggucagagagatt

SEQ ID NO: 802 - DNA, 26 bp, Artificial Sequence
  Description of Artificial Sequence:  Synthetic
  misc_feature (1)..(24): ribonucleotide
cuuugcucacugccacucuaauugtt

SEQ ID NO: 803 - DNA, 27 bp, Artificial Sequence
  Description of Artificial Sequence:  Synthetic
  misc_feature (1)..(25): ribonucleotide
cuuugcucacugccacucuaauugutt

SEQ ID NO: 804 - DNA, 28 bp, Artificial Sequence
  Description of Artificial Sequence:  Synthetic
  misc_feature (1)..(26): ribonucleotide
cuuugcucacugccacucuaauuguctt

SEQ ID NO: 805 - DNA, 35 bp, Artificial Sequence
  Description of Artificial Sequence:  Synthetic
  misc_feature (1)..(33): ribonucleotide
ucuuguacaaacaaaugcuggacugcuggcacatt

SEQ ID NO: 806 - DNA, 28 bp, Artificial Sequence
  Description of Artificial Sequence:  Synthetic
  misc_feature (1)..(26): ribonucleotide
ucucucugaccccgucucuauaccaatt

SEQ ID NO: 807 - DNA, 40 bp, Artificial Sequence
  Description of Artificial Sequence:  Synthetic
  misc_feature (1)..(38): ribonucleotide
ugugccagcaguccagcauugugaaugcagaccaaagatt

SEQ ID NO: 808 - DNA, 40 bp, Artificial Sequence
  Description of Artificial Sequence:  Synthetic
  misc_feature (1)..(38): ribonucleotide
ucuuuggucugcauucacaaugcuggacugcuggcacatt

SEQ ID NO: 809 - DNA, 36 bp, Artificial Sequence
  Description of Artificial Sequence:  Synthetic
  misc_feature (1)..(34): ribonucleotide
ugugccagcaguccagcugaaugcagaccaaagatt

SEQ ID NO: 810 - DNA, 36 bp, Artificial Sequence
  Description of Artificial Sequence:  Synthetic
  misc_feature (1)..(34): ribonucleotide
ucuuuggucugcauucagcuggacugcuggcacatt

SEQ ID NO: 811 - DNA, 40 bp, Artificial Sequence
  Description of Artificial Sequence:  Synthetic
  misc_feature (1)..(38): ribonucleotide
ugugccagcaguccagcaugaaugcagaccaaagaaagtt

SEQ ID NO: 812 - DNA, 40 bp, Artificial Sequence
  Description of Artificial Sequence:  Synthetic
  misc_feature (1)..(38): ribonucleotide
cuuucuuuggucugcauucaugcuggacugcuggcacatt

SEQ ID NO: 813 - DNA, 40 bp, Artificial Sequence
  Description of Artificial Sequence:  Synthetic
  misc_feature (1)..(38): ribonucleotide
ugugccagcaguccagcaugugaaugcagaccaaagaatt

SEQ ID NO: 814 - DNA, 40 bp, Artificial Sequence
  Description of Artificial Sequence:  Synthetic
  misc_feature (1)..(38): ribonucleotide
uucuuuggucugcauucacaugcuggacugcuggcacatt

SEQ ID NO: 815 - DNA, 40 bp, Artificial Sequence
  Description of Artificial Sequence:  Synthetic
  misc_feature (1)..(38): ribonucleotide
cagaggugaagcgaagugcggauguggugauucaggautt

SEQ ID NO: 816 - DNA, 40 bp, Artificial Sequence
  Description of Artificial Sequence:  Synthetic
  misc_feature (1)..(38): ribonucleotide
auccugaaucaccacauccgcacuucgcuucaccucugtt

SEQ ID NO: 817 - DNA, 40 bp, Artificial Sequence
  Description of Artificial Sequence:  Synthetic
  misc_feature (1)..(38): ribonucleotide
agaaaauugagagaaguccggauguggugauucaggautt

SEQ ID NO: 818 - DNA, 40 bp, Artificial Sequence
  Description of Artificial Sequence:  Synthetic
  misc_feature (1)..(38): ribonucleotide
auccugaaucaccacauccggacuucucucaauuuucutt

SEQ ID NO: 819 - RNA, 32 nt, Artificial Sequence
  Description of Artificial Sequence:  Synthetic
agaaaauugagagaaguuucucucaauuuucu

SEQ ID NO: 820 - RNA, 32 nt, Artificial Sequence
  Description of Artificial Sequence:  Synthetic
agaaaauugagagaagcuucucucaauuuucu

SEQ ID NO: 821 - RNA, 30 nt, Artificial Sequence
  Description of Artificial Sequence:  Synthetic
agaaaauugagagaauucucucaauuuucu

SEQ ID NO: 822 - RNA, 31 nt, Artificial Sequence
  Description of Artificial Sequence:  Synthetic
agaaaauugagagaaguuucucucaauuuuc

SEQ ID NO: 823 - RNA, 31 nt, Artificial Sequence
  Description of Artificial Sequence:  Synthetic
agaaaauugagagaagcuucucucaauuuuc

SEQ ID NO: 824 - RNA, 29 nt, Artificial Sequence
  Description of Artificial Sequence:  Synthetic
agaaaauugagagaauucucucaauuuuc

SEQ ID NO: 825 - RNA, 28 nt, Artificial Sequence
  Description of Artificial Sequence:  Synthetic
agaaaauugagagaauucucucaauuuu

SEQ ID NO: 826 - RNA, 27 nt, Artificial Sequence
  Description of Artificial Sequence:  Synthetic
agaaaauugagagaauucucucaauuu

SEQ ID NO: 827 - RNA, 28 nt, Artificial Sequence
  Description of Artificial Sequence:  Synthetic
ggugaagcgaagugcacuucgcuucacc

SEQ ID NO: 828 - DNA, 30 bp, Artificial Sequence
  Description of Artificial Sequence:  Synthetic
  misc_feature (1)..(28): ribonucleotide
ggugaagcgaagugcacuucgcuucacctt

SEQ ID NO: 829 - DNA, 29 bp, Artificial Sequence
  Description of Artificial Sequence:  Synthetic
  misc_feature (1)..(28): ribonucleotide
ggugaagcgaagugcacuucgcuucacct

SEQ ID NO: 830 - RNA, 28 nt, Artificial Sequence
  Description of Artificial Sequence:  Synthetic
ggugaagcgaagugcacuucgcuucacu

SEQ ID NO: 831 - DNA, 30 bp, Artificial Sequence
  Description of Artificial Sequence:  Synthetic
  misc_feature (1)..(28): ribonucleotide
ggugaagcgaagugcacuucgcuucacutt

SEQ ID NO: 832 - RNA, 28 nt, Artificial Sequence
  Description of Artificial Sequence:  Synthetic
ggugaagcgaagugcacuucgcuucauu

SEQ ID NO: 833 - RNA, 32 nt, Artificial Sequence
  Description of Artificial Sequence:  Synthetic
gaggugaagcgaagugcacuucgcuucaccuc

SEQ ID NO: 834 - RNA, 30 nt, Artificial Sequence
  Description of Artificial Sequence:  Synthetic
aggugaagcgaagugcacuucgcuucaccu

SEQ ID NO: 835 - RNA, 26 nt, Artificial Sequence
  Description of Artificial Sequence:  Synthetic
ccaccacgagucuagacucguggugg

SEQ ID NO: 836 - RNA, 26 nt, Artificial Sequence
  Description of Artificial Sequence:  Synthetic
ccaccacgagucuagacucgugguuu

SEQ ID NO: 837 - RNA, 24 nt, Artificial Sequence
  Description of Artificial Sequence:  Synthetic
caccacgagucuagacucguggug

SEQ ID NO: 838 - DNA, 26 bp, Artificial Sequence
  Description of Artificial Sequence:  Synthetic
  misc_feature (1)..(24): ribonucleotide
caccacgagucuagacucguggugtt

SEQ ID NO: 839 - RNA, 24 nt, Artificial Sequence
  Description of Artificial Sequence:  Synthetic
caccacgagucuagacucgugguu

SEQ ID NO: 840 - DNA, 26 bp, Artificial Sequence
  Description of Artificial Sequence:  Synthetic
  misc_feature (1)..(24): ribonucleotide
caccacgagucuagacucgugguutt

SEQ ID NO: 841 - RNA, 22 nt, Artificial Sequence
  Description of Artificial Sequence:  Synthetic
accacgagucuagacucguggu

SEQ ID NO: 842 - DNA, 24 bp, Artificial Sequence
  Description of Artificial Sequence:  Synthetic
  misc_feature (1)..(22): ribonucleotide
accacgagucuagacucguggutt

SEQ ID NO: 843 - RNA, 30 nt, Artificial Sequence
  Description of Artificial Sequence:  Synthetic
aguucuauuuuauugcaauaaaauagaacu

SEQ ID NO: 844 - RNA, 26 nt, Artificial Sequence
  Description of Artificial Sequence:  Synthetic
uucuauuuuauugcaauaaaauagaa

SEQ ID NO: 845 - RNA, 30 nt, Artificial Sequence
  Description of Artificial Sequence:  Synthetic
cgaacguucuucucuagagaagaacguucg

SEQ ID NO: 846 - RNA, 26 nt, Artificial Sequence
  Description of Artificial Sequence:  Synthetic
aacguucuucucuagagaagaacguu

SEQ ID NO: 847 - RNA, 28 nt, Artificial Sequence
  Description of Artificial Sequence:  Synthetic
aacguucuucucuagaggaaagaacguu

SEQ ID NO: 848 - RNA, 30 nt, Artificial Sequence
  Description of Artificial Sequence:  Synthetic
aguugguaaucuucaugaagauuaccaacu

SEQ ID NO: 849 - RNA, 30 nt, Artificial Sequence
  Description of Artificial Sequence:  Synthetic
aaacccaggagcagaucugcuccuggguuu

SEQ ID NO: 850 - RNA, 32 nt, Artificial Sequence
  Description of Artificial Sequence:  Synthetic
uaacgccgucgcccccgggggcgacggcguua

SEQ ID NO: 851 - RNA, 32 nt, Artificial Sequence
  Description of Artificial Sequence:  Synthetic
uaaaauugucuuuuguacaaaagacaauuuua

SEQ ID NO: 852 - RNA, 30 nt, Artificial Sequence
  Description of Artificial Sequence:  Synthetic
aaauugucuuuuguacagaagacaauuuua

SEQ ID NO: 853 - RNA, 26 nt, Artificial Sequence
  Description of Artificial Sequence:  Synthetic
auuacauagaaauauuucuauguaau

SEQ ID NO: 854 - RNA, 28 nt, Artificial Sequence
  Description of Artificial Sequence:  Synthetic
aaacacugcuuugaucaaagcaguguuu

SEQ ID NO: 855 - RNA, 28 nt, Artificial Sequence
  Description of Artificial Sequence:  Synthetic
ucuacucagaauagcuauucugaguaga

SEQ ID NO: 856 - RNA, 28 nt, Artificial Sequence
  Description of Artificial Sequence:  Synthetic
aaauauuucucuaauuagagaaauauuu

SEQ ID NO: 857 - RNA, 28 nt, Artificial Sequence
  Description of Artificial Sequence:  Synthetic
uacacauacaauguacauuguaugugua

SEQ ID NO: 858 - RNA, 30 nt, Artificial Sequence
  Description of Artificial Sequence:  Synthetic
uguggacagagcaagcuugcucuguccaca

SEQ ID NO: 859 - RNA, 30 nt, Artificial Sequence
  Description of Artificial Sequence:  Synthetic
aaccaaggaaacacuaguguuuccuugguu

SEQ ID NO: 860 - RNA, 30 nt, Artificial Sequence
  Description of Artificial Sequence:  Synthetic
ugugaaggagcugugcacagcuccuucaca

SEQ ID NO: 861 - RNA, 30 nt, Artificial Sequence
  Description of Artificial Sequence:  Synthetic
caacguggcacugaauucagugccacguug

SEQ ID NO: 862 - RNA, 28 nt, Artificial Sequence
  Description of Artificial Sequence:  Synthetic
aacguggcacugaauucagugccacguu

SEQ ID NO: 863 - RNA, 30 nt, Artificial Sequence
  Description of Artificial Sequence:  Synthetic
acauugaugaaaucaugauuucaucaaugu

SEQ ID NO: 864 - RNA, 30 nt, Artificial Sequence
  Description of Artificial Sequence:  Synthetic
aaacccauuuccuugcaaggaaauggguuu

SEQ ID NO: 865 - DNA, 41 bp, Artificial Sequence
  Description of Artificial Sequence:  Synthetic
  misc_feature (1)..(39): ribonucleotide
ugucucagaucugagcaccaggacuucucucaauuuucutt

SEQ ID NO: 866 - DNA, 39 bp, Artificial Sequence
  Description of Artificial Sequence:  Synthetic
  misc_feature (1)..(37): ribonucleotide
ucucagaucugagcaccaggacuucucucaauuuucutt

SEQ ID NO: 867 - DNA, 37 bp, Artificial Sequence
  Description of Artificial Sequence:  Synthetic
  misc_feature (1)..(35): ribonucleotide
ucagaucugagcaccaggacuucucucaauuuucutt

SEQ ID NO: 868 - DNA, 35 bp, Artificial Sequence
  Description of Artificial Sequence:  Synthetic
  misc_feature (1)..(33): ribonucleotide
agaucugagcaccaggacuucucucaauuuucutt

SEQ ID NO: 869 - DNA, 34 bp, Artificial Sequence
  Description of Artificial Sequence:  Synthetic
  misc_feature (1)..(32): ribonucleotide
gaucugagcaccaggacuucucucaauuuucutt

SEQ ID NO: 870 - DNA, 33 bp, Artificial Sequence
  Description of Artificial Sequence:  Synthetic
  misc_feature (1)..(31): ribonucleotide
aucugagcaccaggacuucucucaauuuucutt

SEQ ID NO: 871 - DNA, 32 bp, Artificial Sequence
  Description of Artificial Sequence:  Synthetic
  misc_feature (1)..(30): ribonucleotide
ucugagcaccaggacuucucucaauuuucutt

SEQ ID NO: 872 - DNA, 31 bp, Artificial Sequence
  Description of Artificial Sequence:  Synthetic
  misc_feature (1)..(29): ribonucleotide
cugagcaccaggacuucucucaauuuucutt

SEQ ID NO: 873 - DNA, 30 bp, Artificial Sequence
  Description of Artificial Sequence:  Synthetic
  misc_feature (1)..(28): ribonucleotide
ugagcaccaggacuucucucaauuuucutt

SEQ ID NO: 874 - DNA, 29 bp, Artificial Sequence
  Description of Artificial Sequence:  Synthetic
  misc_feature (1)..(27): ribonucleotide
gagcaccaggacuucucucaauuuucutt

SEQ ID NO: 875 - DNA, 28 bp, Artificial Sequence
  Description of Artificial Sequence:  Synthetic
  misc_feature (1)..(26): ribonucleotide
agcaccaggacuucucucaauuuucutt

SEQ ID NO: 876 - DNA, 27 bp, Artificial Sequence
  Description of Artificial Sequence:  Synthetic
  misc_feature (1)..(25): ribonucleotide
gcaccaggacuucucucaauuuucutt

SEQ ID NO: 877 - DNA, 26 bp, Artificial Sequence
  Description of Artificial Sequence:  Synthetic
  misc_feature (1)..(24): ribonucleotide
caccaggacuucucucaauuuucutt

SEQ ID NO: 878 - DNA, 25 bp, Artificial Sequence
  Description of Artificial Sequence:  Synthetic
  misc_feature (1)..(23): ribonucleotide
accaggacuucucucaauuuucutt

SEQ ID NO: 879 - DNA, 24 bp, Artificial Sequence
  Description of Artificial Sequence:  Synthetic
  misc_feature (1)..(22): ribonucleotide
ccaggacuucucucaauuuucutt

SEQ ID NO: 880 - DNA, 23 bp, Artificial Sequence
  Description of Artificial Sequence:  Synthetic
  misc_feature (1)..(21): ribonucleotide
caggacuucucucaauuuucutt

SEQ ID NO: 881 - DNA, 22 bp, Artificial Sequence
  Description of Artificial Sequence:  Synthetic
  misc_feature (1)..(20): ribonucleotide
aggacuucucucaauuuucutt

SEQ ID NO: 882 - DNA, 41 bp, Artificial Sequence
  Description of Artificial Sequence:  Synthetic
  misc_feature (1)..(39): ribonucleotide
agaaaauugagagaaguccuggugcucagaucugagacatt

SEQ ID NO: 883 - DNA, 39 bp, Artificial Sequence
  Description of Artificial Sequence:  Synthetic
  misc_feature (1)..(37): ribonucleotide
agaaaauugagagaaguccuggugcucagaucugagatt

SEQ ID NO: 884 - DNA, 37 bp, Artificial Sequence
  Description of Artificial Sequence:  Synthetic
  misc_feature (1)..(35): ribonucleotide
agaaaauugagagaaguccuggugcucagaucugatt

SEQ ID NO: 885 - DNA, 35 bp, Artificial Sequence
  Description of Artificial Sequence:  Synthetic
  misc_feature (1)..(33): ribonucleotide
agaaaauugagagaaguccuggugcucagaucutt

SEQ ID NO: 886 - DNA, 34 bp, Artificial Sequence
  Description of Artificial Sequence:  Synthetic
  misc_feature (1)..(32): ribonucleotide
agaaaauugagagaaguccuggugcucagauctt

SEQ ID NO: 887 - DNA, 33 bp, Artificial Sequence
  Description of Artificial Sequence:  Synthetic
  misc_feature (1)..(31): ribonucleotide
agaaaauugagagaaguccuggugcucagautt

SEQ ID NO: 888 - DNA, 32 bp, Artificial Sequence
  Description of Artificial Sequence:  Synthetic
  misc_feature (1)..(30): ribonucleotide
agaaaauugagagaaguccuggugcucagatt

SEQ ID NO: 889 - DNA, 31 bp, Artificial Sequence
  Description of Artificial Sequence:  Synthetic
  misc_feature (1)..(29): ribonucleotide
agaaaauugagagaaguccuggugcucagtt

SEQ ID NO: 890 - DNA, 30 bp, Artificial Sequence
  Description of Artificial Sequence:  Synthetic
  misc_feature (1)..(28): ribonucleotide
agaaaauugagagaaguccuggugcucatt

SEQ ID NO: 891 - DNA, 29 bp, Artificial Sequence
  Description of Artificial Sequence:  Synthetic
  misc_feature (1)..(27): ribonucleotide
agaaaauugagagaaguccuggugcuctt

SEQ ID NO: 892 - DNA, 28 bp, Artificial Sequence
  Description of Artificial Sequence:  Synthetic
  misc_feature (1)..(26): ribonucleotide modified as described
agaaaauugagagaaguccuggugcutt

SEQ ID NO: 893 - DNA, 27 bp, Artificial Sequence
  Description of Artificial Sequence:  Synthetic
  misc_feature (1)..(25): ribonucleotide
agaaaauugagagaaguccuggugctt

SEQ ID NO: 894 - DNA, 26 bp, Artificial Sequence
  Description of Artificial Sequence:  Synthetic
  misc_feature (1)..(24): ribonucleotide
agaaaauugagagaaguccuggugtt

SEQ ID NO: 895 - DNA, 25 bp, Artificial Sequence
  Description of Artificial Sequence:  Synthetic
  misc_feature (1)..(23): ribonucleotide
agaaaauugagagaaguccuggutt

SEQ ID NO: 896 - DNA, 24 bp, Artificial Sequence
  Description of Artificial Sequence:  Synthetic
  misc_feature (1)..(22): ribonucleotide
agaaaauugagagaaguccuggtt

SEQ ID NO: 897 - DNA, 23 bp, Artificial Sequence
  Description of Artificial Sequence:  Synthetic
  misc_feature (1)..(21): ribonucleotide
agaaaauugagagaaguccugtt

SEQ ID NO: 898 - DNA, 22 bp, Artificial Sequence
  Description of Artificial Sequence:  Synthetic
  misc_feature (1)..(20): ribonucleotide
agaaaauugagagaaguccutt

SEQ ID NO: 899 - RNA, 38 nt, Artificial Sequence
  Description of Artificial Sequence:  Synthetic
ggucuacgagaccucccggccgggaggucucguagacc

SEQ ID NO: 900 - DNA, 40 bp, Artificial Sequence
  Description of Artificial Sequence:  Synthetic
  misc_feature (1)..(38): ribonucleotide
ggucuacgagaccucccggccgggaggucucguagacctt

SEQ ID NO: 901 - RNA, 36 nt, Artificial Sequence
  Description of Artificial Sequence:  Synthetic
ggucuacgagaccucccgcgggaggucucguagacc

SEQ ID NO: 902 - DNA, 38 bp, Artificial Sequence
  Description of Artificial Sequence:  Synthetic
  misc_feature (1)..(36): ribonucleotide
ggucuacgagaccucccgcgggaggucucguagacctt

SEQ ID NO: 903 - RNA, 34 nt, Artificial Sequence
  Description of Artificial Sequence:  Synthetic
ggucuacgagaccucccgggaggucucguagacc

SEQ ID NO: 904 - DNA, 36 bp, Artificial Sequence
  Description of Artificial Sequence:  Synthetic
  misc_feature (1)..(34): ribonucleotide
ggucuacgagaccucccgggaggucucguagacctt

SEQ ID NO: 905 - RNA, 32 nt, Artificial Sequence
  Description of Artificial Sequence:  Synthetic
ggucuacgagaccuccggaggucucguagacc

SEQ ID NO: 906 - DNA, 34 bp, Artificial Sequence
  Description of Artificial Sequence:  Synthetic
  misc_feature (1)..(32): ribonucleotide
ggucuacgagaccuccggaggucucguagacctt

SEQ ID NO: 907 - RNA, 32 nt, Artificial Sequence
  Description of Artificial Sequence:  Synthetic
gucuacgagaccucccgggaggucucguagac

SEQ ID NO: 908 - DNA, 34 bp, Artificial Sequence
  Description of Artificial Sequence:  Synthetic
  misc_feature (1)..(32): ribonucleotide
gucuacgagaccucccgggaggucucguagactt

SEQ ID NO: 909 - RNA, 30 nt, Artificial Sequence
  Description of Artificial Sequence:  Synthetic
ucuacgagaccucccgggaggucucguaga

SEQ ID NO: 910 - DNA, 32 bp, Artificial Sequence
  Description of Artificial Sequence:  Synthetic
  misc_feature (1)..(30): ribonucleotide
ucuacgagaccucccgggaggucucguagatt

SEQ ID NO: 911 - RNA, 28 nt, Artificial Sequence
  Description of Artificial Sequence:  Synthetic
cuacgagaccucccgggaggucucguag

SEQ ID NO: 912 - DNA, 30 bp, Artificial Sequence
  Description of Artificial Sequence:  Synthetic
  misc_feature (1)..(28): ribonucleotide
cuacgagaccucccgggaggucucguagtt

SEQ ID NO: 913 - RNA, 30 nt, Artificial Sequence
  Description of Artificial Sequence:  Synthetic
ggucuacgagaccuccaggucucguagacc

SEQ ID NO: 914 - DNA, 32 bp, Artificial Sequence
  Description of Artificial Sequence:  Synthetic
  misc_feature (1)..(30): ribonucleotide
ggucuacgagaccuccaggucucguagacctt

SEQ ID NO: 915 - RNA, 30 nt, Artificial Sequence
  Description of Artificial Sequence:  Synthetic
ggucuacgagaccucgaggucucguagacc

SEQ ID NO: 916 - DNA, 32 bp, Artificial Sequence
  Description of Artificial Sequence:  Synthetic
  misc_feature (1)..(30): ribonucleotide
ggucuacgagaccucgaggucucguagacctt

SEQ ID NO: 917 - RNA, 30 nt, Artificial Sequence
  Description of Artificial Sequence:  Synthetic
ggucuacgagaccugcaggucucguagacc

SEQ ID NO: 918 - DNA, 32 bp, Artificial Sequence
  Description of Artificial Sequence:  Synthetic
  misc_feature (1)..(30): ribonucleotide
ggucuacgagaccugcaggucucguagacctt

SEQ ID NO: 919 - DNA, 40 bp, Artificial Sequence
  Description of Artificial Sequence:  Synthetic
  misc_feature (1)..(38): ribonucleotide
gacuaucccacgaacgcucgagcguucgugggauaguctt

SEQ ID NO: 920 - RNA, 38 nt, Artificial Sequence
  Description of Artificial Sequence:  Synthetic
gacuaucccacgaacgcucgagcguucgugggauaguc

SEQ ID NO: 921 - DNA, 34 bp, Artificial Sequence
  Description of Artificial Sequence:  Synthetic
  misc_feature (1)..(32): ribonucleotide
gacuaucccacgaacgcguucgugggauaguctt

SEQ ID NO: 922 - RNA, 32 nt, Artificial Sequence
  Description of Artificial Sequence:  Synthetic
gacuaucccacgaacgcguucgugggauaguc

SEQ ID NO: 923 - DNA, 32 bp, Artificial Sequence
  Description of Artificial Sequence:  Synthetic
  misc_feature (1)..(30): ribonucleotide
gacuaucccacgaacguucgugggauaguctt

SEQ ID NO: 924 - RNA, 30 nt, Artificial Sequence
  Description of Artificial Sequence:  Synthetic
gacuaucccacgaacguucgugggauaguc

SEQ ID NO: 925 - DNA, 30 bp, Artificial Sequence
  Description of Artificial Sequence:  Synthetic
  misc_feature (1)..(28): ribonucleotide
acuaucccacgaacguucgugggauagutt

SEQ ID NO: 926 - RNA, 24 nt, Artificial Sequence
  Description of Artificial Sequence:  Synthetic
acuaucccacgaacguucguggga

SEQ ID NO: 927 - RNA, 32 nt, Artificial Sequence
  Description of Artificial Sequence:  Synthetic
uaucucuucauagccuuauugguaugggcaaa

SEQ ID NO: 928 - RNA, 35 nt, Artificial Sequence
  Description of Artificial Sequence:  Synthetic
ucguccacaaacacaacucuucuuauuuauggcga

SEQ ID NO: 929 - RNA, 33 nt, Artificial Sequence
  Description of Artificial Sequence:  Synthetic
caacgaugaagaaguguucuugauucauuuauu

SEQ ID NO: 930 - RNA, 33 nt, Artificial Sequence
  Description of Artificial Sequence:  Synthetic
acgcgcccaacaccggcauuucauuauagcuau

SEQ ID NO: 931 - RNA, 38 nt, Artificial Sequence
  Description of Artificial Sequence:  Synthetic
uaucucuucauagccuuauuguucuugauucauuuauu

SEQ ID NO: 932 - RNA, 34 nt, Artificial Sequence
  Description of Artificial Sequence:  Synthetic
uaucucuucauagccuuuucuugauucauuuauu

SEQ ID NO: 933 - RNA, 38 nt, Artificial Sequence
  Description of Artificial Sequence:  Synthetic
uaucucuucauagccuuauggcauuucauuauagcuau

SEQ ID NO: 934 - RNA, 38 nt, Artificial Sequence
  Description of Artificial Sequence:  Synthetic
ucguccacaaacacaacucuguucuugauucauuuauu

SEQ ID NO: 935 - RNA, 34 nt, Artificial Sequence
  Description of Artificial Sequence:  Synthetic
ucguccacaaacacaacuucuugauucauuuauu

SEQ ID NO: 936 - RNA, 38 nt, Artificial Sequence
  Description of Artificial Sequence:  Synthetic
ucguccacaaacacaacucggcauuucauuauagcuau

SEQ ID NO: 937 - RNA, 32 nt, Artificial Sequence
  Description of Artificial Sequence:  Synthetic
uuugcccauaccaauaaggcuaugaagagaua

SEQ ID NO: 938 - RNA, 35 nt, Artificial Sequence
  Description of Artificial Sequence:  Synthetic
ucgccauaaauaagaagaguuguguuuguggacga

SEQ ID NO: 939 - RNA, 33 nt, Artificial Sequence
  Description of Artificial Sequence:  Synthetic
aauaaaugaaucaagaacacuucuucaucguug

SEQ ID NO: 940 - RNA, 33 nt, Artificial Sequence
  Description of Artificial Sequence:  Synthetic
auagcuauaaugaaaugccgguguugggcgcgu

SEQ ID NO: 941 - RNA, 38 nt, Artificial Sequence
  Description of Artificial Sequence:  Synthetic
aauaaaugaaucaagaacaauaaggcuaugaagagaua

SEQ ID NO: 942 - RNA, 34 nt, Artificial Sequence
  Description of Artificial Sequence:  Synthetic
aauaaaugaaucaagaaaaggcuaugaagagaua

SEQ ID NO: 943 - RNA, 38 nt, Artificial Sequence
  Description of Artificial Sequence:  Synthetic
auagcuauaaugaaaugccauaaggcuaugaagagaua

SEQ ID NO: 944 - RNA, 38 nt, Artificial Sequence
  Description of Artificial Sequence:  Synthetic
aauaaaugaaucaagaacagaguuguguuuguggacga

SEQ ID NO: 945 - RNA, 34 nt, Artificial Sequence
  Description of Artificial Sequence:  Synthetic
aauaaaugaaucaagaaguuguguuuguggacga

SEQ ID NO: 946 - RNA, 38 nt, Artificial Sequence
  Description of Artificial Sequence:  Synthetic
auagcuauaaugaaaugccgaguuguguuuguggacga

SEQ ID NO: 947 - DNA, 21 bp, Artificial Sequence
  Description of Artificial Sequence:  Synthetic
  misc_feature (1)..(19): ribonucleotide
ggauguggugauucaggautt

SEQ ID NO: 948 - DNA, 21 bp, Artificial Sequence
  Description of Artificial Sequence:  Synthetic
  misc_feature (1)..(19): ribonucleotide
ccucuucuuuuuucuuaaatt

SEQ ID NO: 949 - DNA, 21 bp, Artificial Sequence
  Description of Artificial Sequence:  Synthetic
  misc_feature (1)..(19): ribonucleotide
cucuucuuuuuucuuaaactt

SEQ ID NO: 950 - DNA, 21 bp, Artificial Sequence
  Description of Artificial Sequence:  Synthetic
  misc_feature (1)..(19): ribonucleotide
ucuucuuuuuucuuaaacatt

SEQ ID NO: 951 - DNA, 21 bp, Artificial Sequence
  Description of Artificial Sequence:  Synthetic
  misc_feature (1)..(19): ribonucleotide
uucuuuuuucuuaaacauutt

SEQ ID NO: 952 - DNA, 21 bp, Artificial Sequence
  Description of Artificial Sequence:  Synthetic
  misc_feature (1)..(19): ribonucleotide
uuuuuucuuaaacauuuuutt

SEQ ID NO: 953 - DNA, 21 bp, Artificial Sequence
  Description of Artificial Sequence:  Synthetic
  misc_feature (1)..(19): ribonucleotide
uuuucuuaaacauuuuuuutt

SEQ ID NO: 954 - DNA, 21 bp, Artificial Sequence
  Description of Artificial Sequence:  Synthetic
  misc_feature (1)..(19): ribonucleotide
uuucuuaaacauuuuuuuutt

SEQ ID NO: 955 - DNA, 21 bp, Artificial Sequence
  Description of Artificial Sequence:  Synthetic
  misc_feature (1)..(19): ribonucleotide
cauuuuuuuuuaaaacugutt

SEQ ID NO: 956 - DNA, 21 bp, Artificial Sequence
  Description of Artificial Sequence:  Synthetic
  misc_feature (1)..(19): ribonucleotide
uuuuuaaaacuguauuguutt

SEQ ID NO: 957 - DNA, 21 bp, Artificial Sequence
  Description of Artificial Sequence:  Synthetic
  misc_feature (1)..(19): ribonucleotide
uuuuaaaacuguauuguuutt

SEQ ID NO: 958 - DNA, 21 bp, Artificial Sequence
  Description of Artificial Sequence:  Synthetic
  misc_feature (1)..(19): ribonucleotide
aaaacuguauuguuucucgtt

SEQ ID NO: 959 - DNA, 21 bp, Artificial Sequence
  Description of Artificial Sequence:  Synthetic
  misc_feature (1)..(19): ribonucleotide
uguuucucguuuuaauuuatt

SEQ ID NO: 960 - DNA, 21 bp, Artificial Sequence
  Description of Artificial Sequence:  Synthetic
  misc_feature (1)..(19): ribonucleotide
auuuuugcuugccauuccctt

SEQ ID NO: 961 - DNA, 21 bp, Artificial Sequence
  Description of Artificial Sequence:  Synthetic
  misc_feature (1)..(19): ribonucleotide
cccacuugaaucgggccgatt

SEQ ID NO: 962 - DNA, 21 bp, Artificial Sequence
  Description of Artificial Sequence:  Synthetic
  misc_feature (1)..(19): ribonucleotide
ccacuugaaucgggccgactt

SEQ ID NO: 963 - DNA, 21 bp, Artificial Sequence
  Description of Artificial Sequence:  Synthetic
  misc_feature (1)..(19): ribonucleotide
ccagagagaagucgaggaatt

SEQ ID NO: 964 - DNA, 21 bp, Artificial Sequence
  Description of Artificial Sequence:  Synthetic
  misc_feature (1)..(19): ribonucleotide
cagagagaagucgaggaagtt

SEQ ID NO: 965 - DNA, 21 bp, Artificial Sequence
  Description of Artificial Sequence:  Synthetic
  misc_feature (1)..(19): ribonucleotide
cagagagagcgcgcgggcgtt

SEQ ID NO: 966 - DNA, 21 bp, Artificial Sequence
  Description of Artificial Sequence:  Synthetic
  misc_feature (1)..(19): ribonucleotide
agcugaccagucgcgcugatt

SEQ ID NO: 967 - DNA, 21 bp, Artificial Sequence
  Description of Artificial Sequence:  Synthetic
  misc_feature (1)..(19): ribonucleotide
ccggagcccgcgcccggagtt

SEQ ID NO: 968 - DNA, 21 bp, Artificial Sequence
  Description of Artificial Sequence:  Synthetic
  misc_feature (1)..(19): ribonucleotide
cggagcccgcgcccggaggtt

SEQ ID NO: 969 - DNA, 21 bp, Artificial Sequence
  Description of Artificial Sequence:  Synthetic
  misc_feature (1)..(19): ribonucleotide
ggagcccgcgcccggaggctt

SEQ ID NO: 970 - DNA, 21 bp, Artificial Sequence
  Description of Artificial Sequence:  Synthetic
  misc_feature (1)..(19): ribonucleotide
cugaaacuuuucguccaactt

SEQ ID NO: 971 - DNA, 21 bp, Artificial Sequence
  Description of Artificial Sequence:  Synthetic
  misc_feature (1)..(19): ribonucleotide
ugaaacuuuucguccaacutt

SEQ ID NO: 972 - DNA, 21 bp, Artificial Sequence
  Description of Artificial Sequence:  Synthetic
  misc_feature (1)..(19): ribonucleotide
gaaacuuuucguccaacuutt

SEQ ID NO: 973 - DNA, 21 bp, Artificial Sequence
  Description of Artificial Sequence:  Synthetic
  misc_feature (1)..(19): ribonucleotide
cuuuucguccaacuucuggtt

SEQ ID NO: 974 - DNA, 21 bp, Artificial Sequence
  Description of Artificial Sequence:  Synthetic
  misc_feature (1)..(19): ribonucleotide
ucugggcuguucucgcuuctt

SEQ ID NO: 975 - DNA, 21 bp, Artificial Sequence
  Description of Artificial Sequence:  Synthetic
  misc_feature (1)..(19): ribonucleotide
ugggcuguucucgcuucggtt

SEQ ID NO: 976 - DNA, 21 bp, Artificial Sequence
  Description of Artificial Sequence:  Synthetic
  misc_feature (1)..(19): ribonucleotide
ggaggagccgugguccgcgtt

SEQ ID NO: 977 - DNA, 21 bp, Artificial Sequence
  Description of Artificial Sequence:  Synthetic
  misc_feature (1)..(19): ribonucleotide
gaggagccgugguccgcgctt

SEQ ID NO: 978 - DNA, 21 bp, Artificial Sequence
  Description of Artificial Sequence:  Synthetic
  misc_feature (1)..(19): ribonucleotide
gggaggagccgcagccggatt

SEQ ID NO: 979 - DNA, 21 bp, Artificial Sequence
  Description of Artificial Sequence:  Synthetic
  misc_feature (1)..(19): ribonucleotide
ggaggagccgcagccggagtt

SEQ ID NO: 980 - DNA, 21 bp, Artificial Sequence
  Description of Artificial Sequence:  Synthetic
  misc_feature (1)..(19): ribonucleotide
gaggagccgcagccggaggtt

SEQ ID NO: 981 - DNA, 21 bp, Artificial Sequence
  Description of Artificial Sequence:  Synthetic
  misc_feature (1)..(19): ribonucleotide
agagaaggaagaggagaggtt

SEQ ID NO: 982 - DNA, 21 bp, Artificial Sequence
  Description of Artificial Sequence:  Synthetic
  misc_feature (1)..(19): ribonucleotide
gcuccagccgcgcgcgcuctt

SEQ ID NO: 983 - DNA, 21 bp, Artificial Sequence
  Description of Artificial Sequence:  Synthetic
  misc_feature (1)..(19): ribonucleotide
cccacagcccgagccggagtt

SEQ ID NO: 984 - DNA, 21 bp, Artificial Sequence
  Description of Artificial Sequence:  Synthetic
  misc_feature (1)..(19): ribonucleotide
ccacagcccgagccggagatt

SEQ ID NO: 985 - DNA, 21 bp, Artificial Sequence
  Description of Artificial Sequence:  Synthetic
  misc_feature (1)..(19): ribonucleotide
caugaacuuucugcugucutt

SEQ ID NO: 986 - DNA, 21 bp, Artificial Sequence
  Description of Artificial Sequence:  Synthetic
  misc_feature (1)..(19): ribonucleotide
acuuucugcugucuugggutt

SEQ ID NO: 987 - DNA, 21 bp, Artificial Sequence
  Description of Artificial Sequence:  Synthetic
  misc_feature (1)..(19): ribonucleotide
ugcugucuugggugcauugtt

SEQ ID NO: 988 - DNA, 21 bp, Artificial Sequence
  Description of Artificial Sequence:  Synthetic
  misc_feature (1)..(19): ribonucleotide
ugcauuggagccuugccuutt

SEQ ID NO: 989 - DNA, 21 bp, Artificial Sequence
  Description of Artificial Sequence:  Synthetic
  misc_feature (1)..(19): ribonucleotide
cuugccuugcugcucuacctt

SEQ ID NO: 990 - DNA, 21 bp, Artificial Sequence
  Description of Artificial Sequence:  Synthetic
  misc_feature (1)..(19): ribonucleotide
accuccaccaugccaagugtt

SEQ ID NO: 991 - DNA, 21 bp, Artificial Sequence
  Description of Artificial Sequence:  Synthetic
  misc_feature (1)..(19): ribonucleotide
ccuccaccaugccaaguggtt

SEQ ID NO: 992 - DNA, 21 bp, Artificial Sequence
  Description of Artificial Sequence:  Synthetic
  misc_feature (1)..(19): ribonucleotide
ccaugccaaguggucccagtt

SEQ ID NO: 993 - DNA, 21 bp, Artificial Sequence
  Description of Artificial Sequence:  Synthetic
  misc_feature (1)..(19): ribonucleotide
ccaggcugcacccauggcatt

SEQ ID NO: 994 - DNA, 21 bp, Artificial Sequence
  Description of Artificial Sequence:  Synthetic
  misc_feature (1)..(19): ribonucleotide
ucuaucagcgcagcuacugtt

SEQ ID NO: 995 - DNA, 21 bp, Artificial Sequence
  Description of Artificial Sequence:  Synthetic
  misc_feature (1)..(19): ribonucleotide
ucuuccaggaguacccugatt

SEQ ID NO: 996 - DNA, 21 bp, Artificial Sequence
  Description of Artificial Sequence:  Synthetic
  misc_feature (1)..(19): ribonucleotide
ucuucaagccauccugugutt

SEQ ID NO: 997 - DNA, 21 bp, Artificial Sequence
  Description of Artificial Sequence:  Synthetic
  misc_feature (1)..(19): ribonucleotide
aaugacgagggccuggagutt

SEQ ID NO: 998 - DNA, 21 bp, Artificial Sequence
  Description of Artificial Sequence:  Synthetic
  misc_feature (1)..(19): ribonucleotide
ggccuggagugugugcccatt

SEQ ID NO: 999 - DNA, 21 bp, Artificial Sequence
  Description of Artificial Sequence:  Synthetic
  misc_feature (1)..(19): ribonucleotide
cacugaggaguccaacauctt

SEQ ID NO: 1000 - DNA, 21 bp, Artificial Sequence
  Description of Artificial Sequence:  Synthetic
  misc_feature (1)..(19): ribonucleotide
caacaucaccaugcagauutt

SEQ ID NO: 1001 - DNA, 21 bp, Artificial Sequence
  Description of Artificial Sequence:  Synthetic
  misc_feature (1)..(19): ribonucleotide
aucaccaugcagauuaugctt

SEQ ID NO: 1002 - DNA, 21 bp, Artificial Sequence
  Description of Artificial Sequence:  Synthetic
  misc_feature (1)..(19): ribonucleotide
cagauuaugcggaucaaactt

SEQ ID NO: 1003 - DNA, 21 bp, Artificial Sequence
  Description of Artificial Sequence:  Synthetic
  misc_feature (1)..(19): ribonucleotide
agauuaugcggaucaaacctt

SEQ ID NO: 1004 - DNA, 21 bp, Artificial Sequence
  Description of Artificial Sequence:  Synthetic
  misc_feature (1)..(19): ribonucleotide
gauuaugcggaucaaaccutt

SEQ ID NO: 1005 - DNA, 21 bp, Artificial Sequence
  Description of Artificial Sequence:  Synthetic
  misc_feature (1)..(19): ribonucleotide
aggagagaugagcuuccuatt

SEQ ID NO: 1006 - DNA, 21 bp, Artificial Sequence
  Description of Artificial Sequence:  Synthetic
  misc_feature (1)..(19): ribonucleotide
gagcuuccuacagcacaactt

SEQ ID NO: 1007 - DNA, 21 bp, Artificial Sequence
  Description of Artificial Sequence:  Synthetic
  misc_feature (1)..(19): ribonucleotide
cuuccuacagcacaacaaatt

SEQ ID NO: 1008 - DNA, 21 bp, Artificial Sequence
  Description of Artificial Sequence:  Synthetic
  misc_feature (1)..(19): ribonucleotide
acagcacaacaaaugugaatt

SEQ ID NO: 1009 - DNA, 21 bp, Artificial Sequence
  Description of Artificial Sequence:  Synthetic
  misc_feature (1)..(19): ribonucleotide
cagcacaacaaaugugaautt

SEQ ID NO: 1010 - DNA, 21 bp, Artificial Sequence
  Description of Artificial Sequence:  Synthetic
  misc_feature (1)..(19): ribonucleotide
aaaugugaaugcagaccaatt

SEQ ID NO: 1011 - DNA, 21 bp, Artificial Sequence
  Description of Artificial Sequence:  Synthetic
  misc_feature (1)..(19): ribonucleotide
uuuaagaaaaaagaagaggtt

SEQ ID NO: 1012 - DNA, 21 bp, Artificial Sequence
  Description of Artificial Sequence:  Synthetic
  misc_feature (1)..(19): ribonucleotide
guuuaagaaaaaagaagagtt

SEQ ID NO: 1013 - DNA, 21 bp, Artificial Sequence
  Description of Artificial Sequence:  Synthetic
  misc_feature (1)..(19): ribonucleotide
uguuuaagaaaaaagaagatt

SEQ ID NO: 1014 - DNA, 21 bp, Artificial Sequence
  Description of Artificial Sequence:  Synthetic
  misc_feature (1)..(19): ribonucleotide
aauguuuaagaaaaaagaatt

SEQ ID NO: 1015 - DNA, 21 bp, Artificial Sequence
  Description of Artificial Sequence:  Synthetic
  misc_feature (1)..(19): ribonucleotide
aaaaauguuuaagaaaaaatt

SEQ ID NO: 1016 - DNA, 21 bp, Artificial Sequence
  Description of Artificial Sequence:  Synthetic
  misc_feature (1)..(19): ribonucleotide
aaaaaaauguuuaagaaaatt

SEQ ID NO: 1017 - DNA, 21 bp, Artificial Sequence
  Description of Artificial Sequence:  Synthetic
  misc_feature (1)..(19): ribonucleotide
aaaaaaaauguuuaagaaatt

SEQ ID NO: 1018 - DNA, 21 bp, Artificial Sequence
  Description of Artificial Sequence:  Synthetic
  misc_feature (1)..(19): ribonucleotide
acaguuuuaaaaaaaaaugtt

SEQ ID NO: 1019 - DNA, 21 bp, Artificial Sequence
  Description of Artificial Sequence:  Synthetic
  misc_feature (1)..(19): ribonucleotide
aacaauacaguuuuaaaaatt

SEQ ID NO: 1020 - DNA, 21 bp, Artificial Sequence
  Description of Artificial Sequence:  Synthetic
  misc_feature (1)..(19): ribonucleotide
aaacaauacaguuuuaaaatt

SEQ ID NO: 1021 - DNA, 21 bp, Artificial Sequence
  Description of Artificial Sequence:  Synthetic
  misc_feature (1)..(19): ribonucleotide
cgagaaacaauacaguuuutt

SEQ ID NO: 1022 - DNA, 21 bp, Artificial Sequence
  Description of Artificial Sequence:  Synthetic
  misc_feature (1)..(19): ribonucleotide
uaaauuaaaacgagaaacatt

SEQ ID NO: 1023 - DNA, 21 bp, Artificial Sequence
  Description of Artificial Sequence:  Synthetic
  misc_feature (1)..(19): ribonucleotide
gggaauggcaagcaaaaautt

SEQ ID NO: 1024 - DNA, 21 bp, Artificial Sequence
  Description of Artificial Sequence:  Synthetic
  misc_feature (1)..(19): ribonucleotide
ucggcccgauucaagugggtt

SEQ ID NO: 1025 - DNA, 21 bp, Artificial Sequence
  Description of Artificial Sequence:  Synthetic
  misc_feature (1)..(19): ribonucleotide
gucggcccgauucaaguggtt

SEQ ID NO: 1026 - DNA, 21 bp, Artificial Sequence
  Description of Artificial Sequence:  Synthetic
  misc_feature (1)..(19): ribonucleotide
uuccucgacuucucucuggtt

SEQ ID NO: 1027 - DNA, 21 bp, Artificial Sequence
  Description of Artificial Sequence:  Synthetic
  misc_feature (1)..(19): ribonucleotide
cuuccucgacuucucucugtt

SEQ ID NO: 1028 - DNA, 21 bp, Artificial Sequence
  Description of Artificial Sequence:  Synthetic
  misc_feature (1)..(19): ribonucleotide
cgcccgcgcgcucucucugtt

SEQ ID NO: 1029 - DNA, 21 bp, Artificial Sequence
  Description of Artificial Sequence:  Synthetic
  misc_feature (1)..(19): ribonucleotide
ucagcgcgacuggucagcutt

SEQ ID NO: 1030 - DNA, 21 bp, Artificial Sequence
  Description of Artificial Sequence:  Synthetic
  misc_feature (1)..(19): ribonucleotide
cuccgggcgcgggcuccggtt

SEQ ID NO: 1031 - DNA, 21 bp, Artificial Sequence
  Description of Artificial Sequence:  Synthetic
  misc_feature (1)..(19): ribonucleotide
ccuccgggcgcgggcuccgtt

SEQ ID NO: 1032 - DNA, 21 bp, Artificial Sequence
  Description of Artificial Sequence:  Synthetic
  misc_feature (1)..(19): ribonucleotide
gccuccgggcgcgggcucctt

SEQ ID NO: 1033 - DNA, 21 bp, Artificial Sequence
  Description of Artificial Sequence:  Synthetic
  misc_feature (1)..(19): ribonucleotide
guuggacgaaaaguuucagtt

SEQ ID NO: 1034 - DNA, 21 bp, Artificial Sequence
  Description of Artificial Sequence:  Synthetic
  misc_feature (1)..(19): ribonucleotide
aguuggacgaaaaguuucatt

SEQ ID NO: 1035 - DNA, 21 bp, Artificial Sequence
  Description of Artificial Sequence:  Synthetic
  misc_feature (1)..(19): ribonucleotide
aaguuggacgaaaaguuuctt

SEQ ID NO: 1036 - DNA, 21 bp, Artificial Sequence
  Description of Artificial Sequence:  Synthetic
  misc_feature (1)..(19): ribonucleotide
ccagaaguuggacgaaaagtt

SEQ ID NO: 1037 - DNA, 21 bp, Artificial Sequence
  Description of Artificial Sequence:  Synthetic
  misc_feature (1)..(19): ribonucleotide
gaagcgagaacagcccagatt

SEQ ID NO: 1038 - DNA, 21 bp, Artificial Sequence
  Description of Artificial Sequence:  Synthetic
  misc_feature (1)..(19): ribonucleotide
ccgaagcgagaacagcccatt

SEQ ID NO: 1039 - DNA, 21 bp, Artificial Sequence
  Description of Artificial Sequence:  Synthetic
  misc_feature (1)..(19): ribonucleotide
cgcggaccacggcuccucctt

SEQ ID NO: 1040 - DNA, 21 bp, Artificial Sequence
  Description of Artificial Sequence:  Synthetic
  misc_feature (1)..(19): ribonucleotide
gcgcggaccacggcuccuctt

SEQ ID NO: 1041 - DNA, 21 bp, Artificial Sequence
  Description of Artificial Sequence:  Synthetic
  misc_feature (1)..(19): ribonucleotide
uccggcugcggcuccuccctt

SEQ ID NO: 1042 - DNA, 21 bp, Artificial Sequence
  Description of Artificial Sequence:  Synthetic
  misc_feature (1)..(19): ribonucleotide
cuccggcugcggcuccucctt

SEQ ID NO: 1043 - DNA, 21 bp, Artificial Sequence
  Description of Artificial Sequence:  Synthetic
  misc_feature (1)..(19): ribonucleotide
ccuccggcugcggcuccuctt

SEQ ID NO: 1044 - DNA, 21 bp, Artificial Sequence
  Description of Artificial Sequence:  Synthetic
  misc_feature (1)..(19): ribonucleotide
ccucuccucuuccuucucutt

SEQ ID NO: 1045 - DNA, 21 bp, Artificial Sequence
  Description of Artificial Sequence:  Synthetic
  misc_feature (1)..(19): ribonucleotide
gagcgcgcgcggcuggagctt

SEQ ID NO: 1046 - DNA, 21 bp, Artificial Sequence
  Description of Artificial Sequence:  Synthetic
  misc_feature (1)..(19): ribonucleotide
cuccggcucgggcugugggtt

SEQ ID NO: 1047 - DNA, 21 bp, Artificial Sequence
  Description of Artificial Sequence:  Synthetic
  misc_feature (1)..(19): ribonucleotide
ucuccggcucgggcuguggtt

SEQ ID NO: 1048 - DNA, 21 bp, Artificial Sequence
  Description of Artificial Sequence:  Synthetic
  misc_feature (1)..(19): ribonucleotide
agacagcagaaaguucaugtt

SEQ ID NO: 1049 - DNA, 21 bp, Artificial Sequence
  Description of Artificial Sequence:  Synthetic
  misc_feature (1)..(19): ribonucleotide
acccaagacagcagaaagutt

SEQ ID NO: 1050 - DNA, 21 bp, Artificial Sequence
  Description of Artificial Sequence:  Synthetic
  misc_feature (1)..(19): ribonucleotide
caaugcacccaagacagcatt

SEQ ID NO: 1051 - DNA, 21 bp, Artificial Sequence
  Description of Artificial Sequence:  Synthetic
  misc_feature (1)..(19): ribonucleotide
aaggcaaggcuccaaugcatt

SEQ ID NO: 1052 - DNA, 21 bp, Artificial Sequence
  Description of Artificial Sequence:  Synthetic
  misc_feature (1)..(19): ribonucleotide
gguagagcagcaaggcaagtt

SEQ ID NO: 1053 - DNA, 21 bp, Artificial Sequence
  Description of Artificial Sequence:  Synthetic
  misc_feature (1)..(19): ribonucleotide
cacuuggcaugguggaggutt

SEQ ID NO: 1054 - DNA, 21 bp, Artificial Sequence
  Description of Artificial Sequence:  Synthetic
  misc_feature (1)..(19): ribonucleotide
ccacuuggcaugguggaggtt

SEQ ID NO: 1055 - DNA, 21 bp, Artificial Sequence
  Description of Artificial Sequence:  Synthetic
  misc_feature (1)..(19): ribonucleotide
cugggaccacuuggcauggtt

SEQ ID NO: 1056 - DNA, 21 bp, Artificial Sequence
  Description of Artificial Sequence:  Synthetic
  misc_feature (1)..(19): ribonucleotide
ugccaugggugcagccuggtt

SEQ ID NO: 1057 - DNA, 21 bp, Artificial Sequence
  Description of Artificial Sequence:  Synthetic
  misc_feature (1)..(19): ribonucleotide
caguagcugcgcugauagatt

SEQ ID NO: 1058 - DNA, 21 bp, Artificial Sequence
  Description of Artificial Sequence:  Synthetic
  misc_feature (1)..(19): ribonucleotide
ucaggguacuccuggaagatt

SEQ ID NO: 1059 - DNA, 21 bp, Artificial Sequence
  Description of Artificial Sequence:  Synthetic
  misc_feature (1)..(19): ribonucleotide
acacaggauggcuugaagatt

SEQ ID NO: 1060 - DNA, 21 bp, Artificial Sequence
  Description of Artificial Sequence:  Synthetic
  misc_feature (1)..(19): ribonucleotide
acuccaggcccucgucauutt

SEQ ID NO: 1061 - DNA, 21 bp, Artificial Sequence
  Description of Artificial Sequence:  Synthetic
  misc_feature (1)..(19): ribonucleotide
ugggcacacacuccaggcctt

SEQ ID NO: 1062 - DNA, 21 bp, Artificial Sequence
  Description of Artificial Sequence:  Synthetic
  misc_feature (1)..(19): ribonucleotide
gauguuggacuccucagugtt

SEQ ID NO: 1063 - DNA, 21 bp, Artificial Sequence
  Description of Artificial Sequence:  Synthetic
  misc_feature (1)..(19): ribonucleotide
aaucugcauggugauguugtt

SEQ ID NO: 1064 - DNA, 21 bp, Artificial Sequence
  Description of Artificial Sequence:  Synthetic
  misc_feature (1)..(19): ribonucleotide
gcauaaucugcauggugautt

SEQ ID NO: 1065 - DNA, 21 bp, Artificial Sequence
  Description of Artificial Sequence:  Synthetic
  misc_feature (1)..(19): ribonucleotide
guuugauccgcauaaucugtt

SEQ ID NO: 1066 - DNA, 21 bp, Artificial Sequence
  Description of Artificial Sequence:  Synthetic
  misc_feature (1)..(19): ribonucleotide
gguuugauccgcauaaucutt

SEQ ID NO: 1067 - DNA, 21 bp, Artificial Sequence
  Description of Artificial Sequence:  Synthetic
  misc_feature (1)..(19): ribonucleotide
agguuugauccgcauaauctt

SEQ ID NO: 1068 - DNA, 21 bp, Artificial Sequence
  Description of Artificial Sequence:  Synthetic
  misc_feature (1)..(19): ribonucleotide
uaggaagcucaucucuccutt

SEQ ID NO: 1069 - DNA, 21 bp, Artificial Sequence
  Description of Artificial Sequence:  Synthetic
  misc_feature (1)..(19): ribonucleotide
guugugcuguaggaagcuctt

SEQ ID NO: 1070 - DNA, 21 bp, Artificial Sequence
  Description of Artificial Sequence:  Synthetic
  misc_feature (1)..(19): ribonucleotide
uuuguugugcuguaggaagtt

SEQ ID NO: 1071 - DNA, 21 bp, Artificial Sequence
  Description of Artificial Sequence:  Synthetic
  misc_feature (1)..(19): ribonucleotide
uucacauuuguugugcugutt

SEQ ID NO: 1072 - DNA, 21 bp, Artificial Sequence
  Description of Artificial Sequence:  Synthetic
  misc_feature (1)..(19): ribonucleotide
auucacauuuguugugcugtt

SEQ ID NO: 1073 - DNA, 21 bp, Artificial Sequence
  Description of Artificial Sequence:  Synthetic
  misc_feature (1)..(19): ribonucleotide
uuggucugcauucacauuutt

SEQ ID NO: 1074 - DNA, 43 bp, Artificial Sequence
  Description of Artificial Sequence:  Synthetic
  misc_feature (1)..(19): ribonucleotide
  misc_feature (22)..(22): n stands for 5-nitroindole universal base
  misc_feature (23)..(41): ribonucleotide
ggacaucuuccaggaguacttngaacugaguuuaaaaggcatt

SEQ ID NO: 1075 - DNA, 43 bp, Artificial Sequence
  Description of Artificial Sequence:  Synthetic
  misc_feature (1)..(19): ribonucleotide
  misc_feature (22)..(22): n stands for 5-nitroindole universal base
  misc_feature (23)..(41): ribonucleotide
gugaaugcagaccaaagaattngaacugaguuuaaaaggcatt

SEQ ID NO: 1076 - DNA, 43 bp, Artificial Sequence
  Description of Artificial Sequence:  Synthetic
  misc_feature (1)..(19): ribonucleotide
  misc_feature (22)..(22): n stands for 5-nitroindole universal base
  misc_feature (23)..(41): ribonucleotide
gcacuucgcuucaccucugttnggacuucucucaauuuucutt

SEQ ID NO: 1077 - DNA, 43 bp, Artificial Sequence
  Description of Artificial Sequence:  Synthetic
  misc_feature (1)..(19): ribonucleotide
  misc_feature (22)..(22): n stands for 5-nitroindole universal base
  misc_feature (23)..(41): ribonucleotide
ugagcauggaagaggauucttngaacugaguuuaaaaggcatt

SEQ ID NO: 1078 - DNA, 43 bp, Artificial Sequence
  Description of Artificial Sequence:  Synthetic
  misc_feature (1)..(19): ribonucleotide
  misc_feature (22)..(22): n stands for 5-nitroindole universal base
  misc_feature (23)..(41): ribonucleotide
ggauuaccagggauuucagttnauaaggcuaugaagagauatt

SEQ ID NO: 1079 - DNA, 43 bp, Artificial Sequence
  Description of Artificial Sequence:  Synthetic
  misc_feature (1)..(19): ribonucleotide
  misc_feature (22)..(22): n stands for 5-nitroindole universal base
  misc_feature (23)..(41): ribonucleotide
gaguuguguuuguggacgattnauaaggcuaugaagagauatt

SEQ ID NO: 1080 - DNA, 43 bp, Artificial Sequence
  Description of Artificial Sequence:  Synthetic
  misc_feature (1)..(19): ribonucleotide
  misc_feature (22)..(22): n stands for 5-nitroindole universal base
  misc_feature (23)..(41): ribonucleotide
ccgggaggucucguagaccttngcgaaaggccuugugguactt

SEQ ID NO: 1081 - DNA, 43 bp, Artificial Sequence
  Description of Artificial Sequence:  Synthetic
  misc_feature (1)..(19): ribonucleotide
  misc_feature (22)..(22): n stands for 5-nitroindole universal base
  misc_feature (23)..(41): ribonucleotide modified as described
ccgggaggucucguagaccttnauagggugcuugcgagugctt

SEQ ID NO: 1082 - DNA, 43 bp, Artificial Sequence
  Description of Artificial Sequence:  Synthetic
  misc_feature (1)..(19): ribonucleotide
  misc_feature (22)..(22): n stands for 5-nitroindole universal base
  misc_feature (23)..(41): ribonucleotide
gaacugaguuuaaaaggcattngugaaugcagaccaaagaatt

SEQ ID NO: 1083 - DNA, 43 bp, Artificial Sequence
  Description of Artificial Sequence:  Synthetic
  misc_feature (1)..(19): ribonucleotide
  misc_feature (22)..(22): n stands for 5-nitroindole universal base
  misc_feature (23)..(41): ribonucleotide
ugacggaaaaagagaucguttnauaaggcuaugaagagauatt

SEQ ID NO: 1084 - DNA, 43 bp, Artificial Sequence; identical to SEQ ID NO: 1083
  Description of Artificial Sequence:  Synthetic
  misc_feature (1)..(19): ribonucleotide
  misc_feature (22)..(22): n stands for C12 spacer
  misc_feature (23)..(41): ribonucleotide

SEQ ID NO: 1085 - DNA, 43 bp, Artificial Sequence; identical to SEQ ID NO: 1083
  Description of Artificial Sequence:  Synthetic
  misc_feature (1)..(19): ribonucleotide
  misc_feature (22)..(22): n stands for tetraethelyne glycol spacer
  misc_feature (23)..(41): ribonucleotide

SEQ ID NO: 1086 - DNA, 43 bp, Artificial Sequence; identical to SEQ ID NO: 1083
  Description of Artificial Sequence:  Synthetic
  misc_feature (1)..(19): ribonucleotide
  misc_feature (22)..(22): n stands for 3-nitropyrrole universal base
  misc_feature (23)..(41): ribonucleotide

SEQ ID NO: 1087 - DNA, 44 bp, Artificial Sequence
  Description of Artificial Sequence:  Synthetic
  misc_feature (1)..(19): ribonucleotide
  misc_feature (22)..(23): n stands for 5-nitroindole universal base
  misc_feature (24)..(42): ribonucleotide
ugacggaaaaagagaucguttnnauaaggcuaugaagagauatt

SEQ ID NO: 1088 - DNA, 43 bp, Artificial Sequence
  Description of Artificial Sequence:  Synthetic
  misc_feature (1)..(19): ribonucleotide
  misc_feature (22)..(22): n stands for 5-nitroindole universal base
  misc_feature (23)..(41): ribonucleotide
auaaggcuaugaagagauattnugacggaaaaagagaucgutt

SEQ ID NO: 1089 - DNA, 43 bp, Artificial Sequence
  Description of Artificial Sequence:  Synthetic
  misc_feature (1)..(19): ribonucleotide
  misc_feature (22)..(22): n stands for 5-nitroindole universal base
  misc_feature (23)..(41): ribonucleotide
cguaugcagugaaaacucuttnugacggaaaaagagaucgutt

SEQ ID NO: 1090 - DNA, 43 bp, Artificial Sequence
  Description of Artificial Sequence:  Synthetic
  misc_feature (1)..(19): ribonucleotide
  misc_feature (22)..(22): n stands for 5-nitroindole universal base
  misc_feature (23)..(41): ribonucleotide
cguaugcagugaaaacucuttnauaaggcuaugaagagauatt

SEQ ID NO: 1091 - DNA, 43 bp, Artificial Sequence
  Description of Artificial Sequence:  Synthetic
  misc_feature (1)..(19): ribonucleotide
  misc_feature (22)..(22): n stands for 5-nitroindole universal base
  misc_feature (23)..(41): ribonucleotide
augcuggacugcuggcacattngugaaugcagaccaaagaatt

SEQ ID NO: 1092 - DNA, 43 bp, Artificial Sequence; identical to SEQ ID NO: 1091
  Description of Artificial Sequence:  Synthetic
  misc_feature (1)..(19): ribonucleotide
  misc_feature (22)..(22): n stands for C12 spacer
  misc_feature (23)..(41): ribonucleotide

SEQ ID NO: 1093 - DNA, 43 bp, Artificial Sequence; identical to SEQ ID NO: 1091
  Description of Artificial Sequence:  Synthetic
  misc_feature (1)..(19): ribonucleotide
  misc_feature (22)..(22): n stands for tetraethelyne glycol spacer
  misc_feature (23)..(41): ribonucleotide

SEQ ID NO: 1094 - DNA, 43 bp, Artificial Sequence; identical to SEQ ID NO: 1091
  Description of Artificial Sequence:  Synthetic
  misc_feature (1)..(19): ribonucleotide
  misc_feature (22)..(22): n stands for 3-nitropyrrole universal base
  misc_feature (23)..(41): ribonucleotide

SEQ ID NO: 1095 - DNA, 44 bp, Artificial Sequence
  Description of Artificial Sequence:  Synthetic
  misc_feature (1)..(19): ribonucleotide
  misc_feature (22)..(23): n stands for 5-nitroindole universal base
  misc_feature (24)..(42): ribonucleotide
augcuggacugcuggcacattnngugaaugcagaccaaagaatt

SEQ ID NO: 1096 - DNA, 43 bp, Artificial Sequence
  Description of Artificial Sequence:  Synthetic
  misc_feature (1)..(19): ribonucleotide
  misc_feature (22)..(22): n stands for 5-nitroindole universal base
  misc_feature (23)..(41): ribonucleotide
auagggugcuugcgagugcttngcgaaaggccuugugguactt

SEQ ID NO: 1097 - DNA, 21 bp, Artificial Sequence
  Description of Artificial Sequence:  Synthetic
  misc_feature (1)..(19): ribonucleotide
gaacugaguuuaaaaggcatt

SEQ ID NO: 1098 - DNA, 21 bp, Artificial Sequence
  Description of Artificial Sequence:  Synthetic
  misc_feature (1)..(19): ribonucleotide
auaaggcuaugaagagauatt

SEQ ID NO: 1099 - DNA, 21 bp, Artificial Sequence
  Description of Artificial Sequence:  Synthetic
  misc_feature (1)..(19): ribonucleotide
ugacggaaaaagagaucgutt

SEQ ID NO: 1100 - DNA, 21 bp, Artificial Sequence
  Description of Artificial Sequence:  Synthetic
  misc_feature (1)..(19): ribonucleotide
gaguuguguuuguggacgatt

SEQ ID NO: 1101 - DNA, 21 bp, Artificial Sequence
  Description of Artificial Sequence:  Synthetic
  misc_feature (1)..(19): ribonucleotide
cguaugcagugaaaacucutt

SEQ ID NO: 1102 - DNA, 21 bp, Artificial Sequence
  Description of Artificial Sequence:  Synthetic
  misc_feature (1)..(19): ribonucleotide
ggauuaccagggauuucagtt

SEQ ID NO: 1103 - DNA, 21 bp, Artificial Sequence
  Description of Artificial Sequence:  Synthetic
  misc_feature (1)..(19): ribonucleotide
gcgaaaggccuugugguactt

SEQ ID NO: 1104 - DNA, 21 bp, Artificial Sequence
  Description of Artificial Sequence:  Synthetic
  misc_feature (1)..(19): ribonucleotide
auagggugcuugcgagugctt

SEQ ID NO: 1105 - DNA, 21 bp, Artificial Sequence
  Description of Artificial Sequence:  Synthetic
  misc_feature (1)..(19): ribonucleotide
ugccuuuuaaacucaguuctt

SEQ ID NO: 1106 - DNA, 21 bp, Artificial Sequence
  Description of Artificial Sequence:  Synthetic
  misc_feature (1)..(19): ribonucleotide
uaucucuucauagccuuautt

SEQ ID NO: 1107 - DNA, 21 bp, Artificial Sequence
  Description of Artificial Sequence:  Synthetic
  misc_feature (1)..(19): ribonucleotide
acgaucucuuuuuccgucatt

SEQ ID NO: 1108 - DNA, 21 bp, Artificial Sequence
  Description of Artificial Sequence:  Synthetic
  misc_feature (1)..(19): ribonucleotide
ucguccacaaacacaacuctt

SEQ ID NO: 1109 - DNA, 21 bp, Artificial Sequence
  Description of Artificial Sequence:  Synthetic
  misc_feature (1)..(19): ribonucleotide
agaguuuucacugcauacgtt

SEQ ID NO: 1110 - DNA, 21 bp, Artificial Sequence
  Description of Artificial Sequence:  Synthetic
  misc_feature (1)..(19): ribonucleotide
cugaaaucccugguaaucctt

SEQ ID NO: 1111 - DNA, 21 bp, Artificial Sequence
  Description of Artificial Sequence:  Synthetic
  misc_feature (1)..(19): ribonucleotide
guaccacaaggccuuucgctt

SEQ ID NO: 1112 - DNA, 21 bp, Artificial Sequence
  Description of Artificial Sequence:  Synthetic
  misc_feature (1)..(19): ribonucleotide
gcacucgcaagcacccuautt

SEQ ID NO: 1113 - DNA, 21 bp, Artificial Sequence
  Description of Artificial Sequence:  Synthetic
  misc_feature (1)..(19): ribonucleotide
ggucuacgagaccucccggtt

SEQ ID NO: 1114 - protein, 16 aa, Artificial Sequence
  misc_feature: Synthetic peptide
  misc_feature (16)..(16): Amide-substituted carboxy terminus on the lysine residue.
RQIKIWFQNRRMKWKK

SEQ ID NO: 1115 - protein, 26 aa, Artificial Sequence
  misc_feature: Synthetic peptide
AAVALLPAVLLALLAPVQRKRQKLMP

SEQ ID NO: 1116 - protein, 17 aa, Artificial Sequence
  misc_feature: Synthetic peptide
MGLGLHLLVLAAALQGA

SEQ ID NO: 1117 - protein, 24 aa, Artificial Sequence
  misc_feature: Synthetic peptide
GALFLGFLGAAGSTMGAPKSKRKV

SEQ ID NO: 1118 - protein, 9 aa, Artificial Sequence
  misc_feature: Synthetic peptide
RKKRRQRRR

SEQ ID NO: 1119 - protein, 24 aa, Artificial Sequence
  misc_feature: Synthetic peptide
GLFEAIAGFIENGWEGMIDGGGYC

SEQ ID NO: 1120 - protein, 5 aa, Artificial Sequence
  misc_feature (1)..(1): Xaa stands for any amino acid
  misc_feature (5)..(5): Xaa stands for any amino acid
  misc_feature: Synthetic peptide
XRGDX

SEQ ID NO: 1121 - protein, 27 aa, Artificial Sequence
  misc_feature: Synthetic peptide
GWTLNSAGYLLGKINLKALAALAKKIL

SEQ ID NO: 1122 - protein, 9 aa, Artificial Sequence
  misc_feature (1)..(1): Ser stands for optional Serine for coupling
  misc_feature (2)..(2): Phe stands for optional D isomer for stability
  misc_feature (5)..(5): Trp stands for optional D isomer for stability
  misc_feature: Synthetic peptide
SFCYWKTCT

SEQ ID NO: 1123 - protein, 9 aa, Artificial Sequence
  misc_feature (1)..(1): Ser stands for optional Serine for coupling
  misc_feature: Synthetic peptide
SDHQLNPAF

SEQ ID NO: 1124 - DNA, 40 bp, Artificial Sequence
  Description of Artificial Sequence:  Synthetic
  misc_feature (1)..(38): ribonucleotide
ugccagcaguccagcauggugugaaugcagaccaaagatt

SEQ ID NO: 1125 - DNA, 40 bp, Artificial Sequence
  Description of Artificial Sequence:  Synthetic
  misc_feature (1)..(38): ribonucleotide
ucuuuggucugcauucacaccaugcuggacugcuggcatt

SEQ ID NO: 1126 - RNA, 19 nt, Artificial Sequence
  Description of Artificial Sequence:  Synthetic
caauuagaguggcagugag

SEQ ID NO: 1127 - RNA, 19 nt, Artificial Sequence
  Description of Artificial Sequence:  Synthetic
cucacugccacucuaauug

SEQ ID NO: 1128 - RNA, 19 nt, Artificial Sequence
  Description of Artificial Sequence:  Synthetic
gaaacgagugacggugaga

SEQ ID NO: 1129 - RNA, 19 nt, Artificial Sequence
  Description of Artificial Sequence:  Synthetic
ucucaccgucacucguuuc

SEQ ID NO: 1130 - RNA, 24 nt, Artificial Sequence
  Description of Artificial Sequence:  Synthetic
caauuagaguggcagugagcaaag

SEQ ID NO: 1131 - RNA, 24 nt, Artificial Sequence
  Description of Artificial Sequence:  Synthetic
guuaaucucaccgucacucguuuc

SEQ ID NO: 1132 - RNA, 30 nt, Artificial Sequence
  Description of Artificial Sequence:  Synthetic
caauuagaguggcaguggcagugagcaaag

SEQ ID NO: 1133 - RNA, 30 nt, Artificial Sequence
  Description of Artificial Sequence:  Synthetic
guuaaucucaccgucaccgucacucguuuc

SEQ ID NO: 1134 - DNA, 21 bp, Artificial Sequence
  Description of Artificial Sequence:  Synthetic
  misc_feature (1)..(4): Phosphorothioate or Phosphorodithioate 3'-Internucleotide Linkage (optionally absent)
  misc_feature (1)..(1): 5'-3 attached terminal deoxyabasic moiety inverted abasic, inverted nucleotide or other terminal cap that is optionally present
  misc_feature (17)..(20): Phosphorothioate or Phosphorodithioate 3'-Internucleotide Linkage (optionally absent)
  misc_feature (21)..(21): 3'-3 attached terminal deoxyabasic moiety inverted abasic, inverted nucleotide or other terminal cap that is optionally present
  misc_feature (1)..(19): ribonucleotide modified as described
  misc_feature (20)..(21): n stands for any nucleotide
nnnnnnnnnnnnnnnnnnnnn

SEQ ID NO: 1135 - DNA, 21 bp, Artificial Sequence
  Description of Artificial Sequence:  Synthetic
  misc_feature (1)..(5): Phosphorothioate or Phosphorodithioate 3'-Internucleotide Linkage (optionally absent)
  misc_feature (20)..(20): Phosphorothioate or Phosphorodithioate 3'-Internucleotide Linkage (optionally absent)
  misc_feature (1)..(19): ribonucleotide modified as described
  misc_feature (20)..(21): n stands for any nucleotide
  misc_feature (21)..(21): 3'-3 attached terminal glyceryl moiety or inverted deoxyabasic (optionally present)
nnnnnnnnnnnnnnnnnnnnn

SEQ ID NO: 1136 - DNA, 21 bp, Artificial Sequence
  Description of Artificial Sequence:  Synthetic
  misc_feature (1)..(19): n is any ribonucleotide wherein any pyrimidine is 2'-Fluoro or 2'-o-methyl
  misc_feature (20)..(20): Phosphorothioate or Phosphorodithioate 3'-Internucleotide Linkage (optionally absent)
  misc_feature (20)..(21): n stands for any nucleotide
nnnnnnnnnnnnnnnnnnnnn

SEQ ID NO: 1137 - DNA, 21 bp, Artificial Sequence
  Description of Artificial Sequence:  Synthetic
  misc_feature (1)..(19): n is any ribonucleotide wherein any pyrimidine is 2'-Fluoro
  misc_feature (20)..(21): n stands for any nucleotide
  misc_feature (21)..(21): 3'-3 attached terminal glyceryl moiety or inverted deoxyabasic (optionally present)
nnnnnnnnnnnnnnnnnnnnn

SEQ ID NO: 1138 - DNA, 21 bp, Artificial Sequence
  Description of Artificial Sequence:  Synthetic
  misc_feature (1)..(19): n is any ribonucleotide wherein any pyrimidine is 2'-O-methyl or 2'-Fluoro
  misc_feature (20)..(21): n stands for any nucleotide
  misc_feature (1)..(1): 5'-3 attached terminal deoxyabasic moiety, inverted abasic, inverted nucleotide or other terminal cap that is optionally present
  misc_feature (21)..(21): 3'-3 attached terminal deoxyabasic moiety, inverted abasic, inverted nucleotide or other terminal cap that is optionally present
nnnnnnnnnnnnnnnnnnnnn

SEQ ID NO: 1139 - DNA, 21 bp, Artificial Sequence
  Description of Artificial Sequence:  Synthetic
  misc_feature (1)..(19): n is any ribonucleotide wherein any pyrimidine is 2'-Fluoro
  misc_feature (20)..(20): Phosphorothioate or Phosphorodithioate 3'-Internucleotide Linkage (optionally absent)
  misc_feature (20)..(21): n stands for any nucleotide
  misc_feature (21)..(21): 3'-3 attached terminal glyceryl moiety or inverted deoxyabasic (optionally present)
nnnnnnnnnnnnnnnnnnnnn

SEQ ID NO: 1140 - DNA, 21 bp, Artificial Sequence
  Description of Artificial Sequence:  Synthetic
  misc_feature (1)..(19): n is any ribonucleotide wherein any pyrimidine is 2'-Fluoro and any purine is 2'-Deoxy
  misc_feature (20)..(21): n stands for any nucleotide
  misc_feature (1)..(1): 5'-3 attached terminal deoxyabasic moiety, inverted abasic, inverted nucleotide or other terminal cap that is optionally present
  misc_feature (21)..(21): 3'-3 attached terminal deoxyabasic moiety, inverted abasic, inverted nucleotide or other terminal cap that is optionally present
nnnnnnnnnnnnnnnnnnnnn

SEQ ID NO: 1141 - DNA, 21 bp, Artificial Sequence
  Description of Artificial Sequence:  Synthetic
  misc_feature (1)..(19): n is any ribonucleotide wherein any pyrimidine is 2'-Fluoro and any purine is 2'-O-methyl
  misc_feature (20)..(20): Phosphorothioate or Phosphorodithioate 3'-Internucleotide Linkage (optionally absent)
  misc_feature (20)..(21): n stands for any nucleotide
  misc_feature (21)..(21): 3'-3 attached terminal glyceryl moiety or inverted deoxyabasic (optionally present)
nnnnnnnnnnnnnnnnnnnnn

SEQ ID NO: 1142 - DNA, 21 bp, Artificial Sequence
  Description of Artificial Sequence:  Synthetic
  misc_feature (1)..(19): n is any ribonucleotide wherein any pyrimidine is 2'-Fluoro
  misc_feature (20)..(21): n stands for any nucleotide
  misc_feature (1)..(1): 5'-3 attached terminal deoxyabasic moiety, inverted abasic, inverted nucleotide or other terminal cap that is optionally present
  misc_feature (21)..(21): 3'-3 attached terminal deoxyabasic moiety, inverted abasic, inverted nucleotide or other terminal cap that is optionally present
nnnnnnnnnnnnnnnnnnnnn

SEQ ID NO: 1143 - DNA, 21 bp, Artificial Sequence
  Description of Artificial Sequence:  Synthetic
  misc_feature (1)..(19): n is any ribonucleotide wherein any pyrimidine is 2'-Fluoro and any purine is 2'-deoxy
  misc_feature (20)..(21): n stands for any nucleotide
  misc_feature (20)..(20): Phosphorothioate or Phosphorodithioate 3'-Internucleotide Linkage (optionally absent)
  misc_feature (21)..(21): 3'-3 attached terminal glyceryl moiety or inverted deoxyabasic (optionally present)
nnnnnnnnnnnnnnnnnnnnn

SEQ ID NO: 1144 - DNA, 21 bp, Artificial Sequence
  Description of Artificial Sequence:  Synthetic
  misc_feature (1)..(4): Phosphorothioate or Phosphorodithioate 3'-Internucleotide Linkage (optionally present)
  misc_feature (1)..(4): 2'-O-Methyl or 2'-deoxy-2'-Fluoro
  misc_feature (11)..(14): 2'-O-Methyl or 2'-deoxy-2'-Fluoro
  misc_feature (16)..(16): 2'-O-Methyl or 2'-deoxy-2'-Fluoro
  misc_feature (17)..(20): Phosphorothioate or Phosphorodithioate 3'-Internucleotide Linkage (optionally present)
  misc_feature (1)..(19): ribonucleotide modified as described
ccccgggaggucucguagatt

SEQ ID NO: 1145 - DNA, 21 bp, Artificial Sequence
  Description of Artificial Sequence:  Synthetic
  misc_feature (1)..(4): Phosphorothioate or Phosphorodithioate 3'-Internucleotide Linkage (optionally present)
  misc_feature (1)..(3): 2'-deoxy-2'-Fluoro
  misc_feature (5)..(5): 2'-deoxy-2'-Fluoro
  misc_feature (10)..(15): 2'-deoxy-2'-Fluoro
  misc_feature (20)..(20): Phosphorothioate or Phosphorodithioate 3'-Internucleotide Linkage (optionally present)
  misc_feature (1)..(19): ribonucleotide modified as described
  misc_feature (21)..(21): 3'-3 attached terminal glyceryl moiety or inverted deoxyabasic (optionally present)
ucuacgagaccucccggggtt

SEQ ID NO: 1146 - DNA, 21 bp, Artificial Sequence
  Description of Artificial Sequence:  Synthetic
  misc_feature (1)..(4): 2'-O-Methyl or 2'-deoxy-2'-Fluoro
  misc_feature (11)..(14): 2'-O-Methyl or 2'-deoxy-2'-Fluoro
  misc_feature (16)..(17): 2'-O-Methyl or 2'-deoxy-2'-Fluoro
  misc_feature (20)..(20): Phosphorothioate or Phosphorodithioate 3'-Internucleotide Linkage (optionally present)
  misc_feature (1)..(19): ribonucleotide modified as described
ccccgggaggucucguagatt

SEQ ID NO: 1147 - DNA, 21 bp, Artificial Sequence
  Description of Artificial Sequence:  Synthetic
  misc_feature (1)..(3): 2'-deoxy-2'-Fluoro
  misc_feature (5)..(5): 2'-deoxy-2'-Fluoro
  misc_feature (10)..(15): 2'-deoxy-2'-Fluoro
  misc_feature (1)..(19): ribonucleotide modified as described
  misc_feature (21)..(21): 3'-3 attached terminal glyceryl moiety or inverted deoxyabasic (optionally present)
ucuacgagaccucccggggtt

SEQ ID NO: 1148 - DNA, 21 bp, Artificial Sequence
  Description of Artificial Sequence:  Synthetic
  misc_feature (1)..(4): 2'-O-Methyl or 2'-deoxy-2'-Fluoro
  misc_feature (11)..(14): 2'-O-Methyl or 2'-deoxy-2'-Fluoro
  misc_feature (16)..(16): 2'-O-Methyl or 2'-deoxy-2'-Fluoro
  misc_feature (1)..(1): 5'-3 attached terminal deoxyabasic moiety, inverted abasic, inverted nucleotide or other terminal cap that is optionally present
  misc_feature (21)..(21): 3'-3 attached terminal deoxyabasic moiety, inverted abasic, inverted nucleotide or other terminal cap that is optionally present
  misc_feature (1)..(19): ribonucleotide modified as described
ccccgggaggucucguagatt

SEQ ID NO: 1149 - DNA, 21 bp, Artificial Sequence
  Description of Artificial Sequence:  Synthetic
  misc_feature (1)..(3): 2'-deoxy-2'-Fluoro
  misc_feature (5)..(5): 2'-deoxy-2'-Fluoro
  misc_feature (10)..(15): 2'-deoxy-2'-Fluoro
  misc_feature (1)..(19): ribonucleotide modified as described
  misc_feature (20)..(20): Phosphorothioate or Phosphorodithioate 3'-Internucleotide Linkage (optionally present)
  misc_feature (21)..(21): 3'-3 attached terminal glyceryl moiety or inverted deoxyabasic (optionally present)
ucuacgagaccucccggggtt

SEQ ID NO: 1150 - DNA, 21 bp, Artificial Sequence
  Description of Artificial Sequence:  Synthetic
  misc_feature (5)..(10): 2'-deoxy
  misc_feature (15)..(15): 2'-deoxy
  misc_feature (17)..(19): 2'-deoxy
  misc_feature (1)..(4): 2'-deoxy-2'-Fluoro
  misc_feature (11)..(14): 2'-deoxy-2'-Fluoro
  misc_feature (16)..(16): 2'-deoxy-2'-Fluoro
  misc_feature (1)..(1): 5'-3 attached terminal deoxyabasic moiety, inverted abasic, inverted nucleotide or other terminal cap that is optionally present
  misc_feature (21)..(21): 3'-3 attached terminal deoxyabasic moiety, inverted abasic, inverted nucleotide or other terminal cap that is optionally present
  misc_feature (1)..(19): ribonucleotide modified as described
ccccgggaggucucguagatt

SEQ ID NO: 1151 - DNA, 21 bp, Artificial Sequence
  Description of Artificial Sequence:  Synthetic
  misc_feature (1)..(3): 2'-deoxy-2'-Fluoro
  misc_feature (5)..(5): 2'-deoxy-2'-Fluoro
  misc_feature (10)..(15): 2'-deoxy-2'-Fluoro
  misc_feature (4)..(4): 2'-O-methyl
  misc_feature (6)..(9): 2'-O-methyl
  misc_feature (16)..(19): 2'-O-methyl
  misc_feature (1)..(19): ribonucleotide modified as described
  misc_feature (20)..(20): Phosphorothioate or Phosphorodithioate 3'-Internucleotide Linkage (optionally present)
  misc_feature (21)..(21): 3'-3 attached terminal glyceryl moiety or inverted deoxyabasic (optionally present)
ucuacgagaccucccggggtt

SEQ ID NO: 1152 - DNA, 21 bp, Artificial Sequence
  Description of Artificial Sequence:  Synthetic
  misc_feature (1)..(4): 2'-deoxy-2'-Fluoro
  misc_feature (11)..(14): 2'-deoxy-2'-Fluoro
  misc_feature (16)..(16): 2'-deoxy-2'-Fluoro
  misc_feature (1)..(1): 5'-3 attached terminal deoxyabasic moiety, inverted abasic, inverted nucleotide or other terminal cap that is optionally present
  misc_feature (21)..(21): 3'-3 attached terminal deoxyabasic moiety, inverted abasic, inverted nucleotide or other terminal cap that is optionally present
  misc_feature (1)..(19): ribonucleotide modified as described
ccccgggaggucucguagatt

SEQ ID NO: 1153 - DNA, 21 bp, Artificial Sequence
  Description of Artificial Sequence:  Synthetic
  misc_feature (1)..(3): 2'-deoxy
  misc_feature (5)..(5): 2'-deoxy
  misc_feature (10)..(15): 2'-deoxy
  misc_feature (4)..(4): 2'-deoxy-2'-Fluoro
  misc_feature (6)..(9): 2'-deoxy-2'-Fluoro
  misc_feature (16)..(19): 2'-deoxy-2'-Fluoro
  misc_feature (1)..(19): ribonucleotide modified as described
  misc_feature (20)..(20): Phosphorothioate or Phosphorodithioate 3'-Internucleotide Linkage (optionally present)
  misc_feature (21)..(21): 3'-3 attached terminal glyceryl moiety or inverted deoxyabasic (optionally present)
ucuacgagaccucccggggtt

What we claim is:

1. A multifunctional siNA molecule comprising a structure having Formula MF-III:
X X′
Y′-W-Y
wherein
(a) each X, X′, Y, and Y′ is independently an oligonucleotide of length between about 15 nucleotides and about 50 nucleotides;
(b) X comprises nucleotide sequence that is complementary to nucleotide sequence present in region Y′;
(c) X′ comprises nucleotide sequence that is complementary to nucleotide sequence present in region Y;
(d) each X and X′ is independently of length sufficient to stably interact with a first and a second target nucleic acid sequence, respectively, or a portion thereof;
(e) W represents a nucleotide or non-nucleotide linker that connects sequences Y′ and Y; and
(f) said multifunctional siNA directs cleavage of the first and second target sequence via RNA interference.

2. The multifunctional siNA molecule of claims 1, wherein W connects the 3′-end of sequence Y′ with the 3′-end of sequence Y.

3. The multifunctional siNA molecule of claims 1, wherein W connects the 3′-end of sequence Y′ with the 5′-end of sequence Y.

4. The multifunctional siNA molecule of claims 1, wherein W connects the 5′-end of sequence Y′ with the 5′-end of sequence Y.

5. The multifunctional siNA molecule of claims 1, wherein W connects the 5′-end of sequence Y′ with the 3′-end of sequence Y.

6. The multifunctional siNA molecule of claim 1, wherein a terminal phosphate group is present at the 5′-end of any of sequence X, X′, Y, or Y′.

7. The multifunctional siNA molecule of claim 1, wherein W connects sequences Y and Y′ via a biodegradable linker.

8. The multifunctional siNA molecule of claim 1, wherein W further comprises a conjugate, label, aptamer, ligand, lipid, or polymer.

9. The multifunctional siNA molecule of claim 1, wherein any of sequence X, X′, Y, or Y′ comprises a 3′-terminal cap moiety.

10. The multifunctional siNA molecule of claim 9, wherein said terminal cap moiety is an inverted deoxyabasic moiety.

11. The multifunctional siNA molecule of claim 10, wherein said terminal cap moiety is an inverted deoxynucleotide moiety.

12. The multifunctional siNA molecule of claim 10, wherein said terminal cap moiety is a dinucleotide moiety.

13. The multifunctional siNA molecule of claim 12, wherein said dinucleotide is dithymidine (TT).

14. The multifunctional siNA molecule of claim 1, wherein said siNA molecule comprises no ribonucleotides.

15. The multifunctional siNA molecule of claim 1, wherein said siNA molecule comprises ribonucleotides.

16. The multifunctional siNA molecule of claim 1, wherein any purine nucleotide in said siNA is a 2′-O-methylpyrimidine nucleotide.

17. The multifunctional siNA molecule of claim 1, wherein any purine nucleotide in said siNA is a 2′-deoxy purine nucleotide.

18. The multifunctional siNA molecule of claim 1, wherein any pyrimidine nucleotide in said siNA is a 2′-deoxy-2′-fluoro pyrimidine nucleotide.

19. The multifunctional siNA molecule of claim 1, wherein each X, X′, Y, and Y′ independently comprises between about 19 and about 23 nucleotides.

20. A pharmaceutical composition comprising the multifunctional siNA molecule of claim 1 in an acceptable carrier or diluent.
